(19) United States
(12) Patent Application Publication
(10) Pub. No.: US 2024/0279318 A1
(43) Pub. Date: Aug. 22, 2024

(54) ANTIBODIES TARGETING AFP PEPTIDE/MHC COMPLEXES AND USES THEREOF

(71) Applicant: Nanjing Legend Biotech Co., Ltd., Nanjing (CN)

(72) Inventors: Mingxin LI, Nanjing (CN); Zhigang LI, Nanjing (CN); Shuai YANG, Nanjing (CN); Ming ZENG, Nanjing (CN); Sujuan Wang, Nanjing (CN); Lan XU, Nanjing (CN); Shu Wu, Nanjing (CN)

(21) Appl. No.: 18/560,661

(22) PCT Filed: May 31, 2022
(86) PCT No.: PCT/CN2022/096357

§ 371 Date: Nov. 13, 2023

(30) Foreign Application Priority Data
May 31, 2021 (WO) PCT/CN2021/097081

(51) Int. Cl. C07K 16/18; A61K 39/00; C07K 14/705; C07K 14/725; C07K 16/28; C12N 5/0783

(52) U.S. Cl. CPC C07K 16/18; A61K 39/4611; A61K 39/4631; A61K 39/4644; C07K 14/7051; C07K 14/70521; C07K 14/70578; C07K 16/2833; C12N 5/0636; C07K 2317/22; C07K 2317/24; C07K 2317/31; C07K 2317/33; C07K 2317/622; C07K 2317/92; C07K 2319/02; C12N 2510/00

(57) ABSTRACT

This disclosure relates to antibodies, antigen-binding fragments, protein constructs, and chimeric antigen receptors that bind to a complex comprising an AFP peptide and an MHC molecule, and the uses thereof.

[0001] This application claims priority benefits of International Patent Application No. PCT/CN2021/097081 filed May 31, 2021, the contents of which are incorporated herein by reference in their entirety.

### SEQUENCE STATEMENT

[0002] The contents of the following submission on ASCII text file are incorporated herein by reference in their entirety: a computer readable form (CRF) of the Sequence Listing (file name: P11161-PCT.220531. Sequence listing.txt, date recorded: May 31, 2022, size: 698 KB).

### TECHNICAL FIELD

[0003] This disclosure relates to antibodies, antigen-binding fragments, protein constructs, and chimeric antigen receptors that target AFP peptide/MHC complexes and uses thereof.

### BACKGROUND

[0004] Liver cancer is predicted to be the sixth most commonly diagnosed cancer and the fourth leading cause of cancer death worldwide. In 2018, there were about 841,000 new cases and 782,000 deaths annually. 75%-85% of primary liver cancer are hepatocellular carcinoma (HCC). The main risk factors for HCC are chronic infection with hepatitis B virus (HBV) or hepatitis C virus (HCV), aflatoxin-contaminated foodstuffs, heavy alcohol intake, obesity, smoking, and type 2 diabetes. The HBV infection has been dramatically reduced by vaccination, whereas, there is no vaccine available to prevent HCV infection right now. More importantly, the burden of HCC is steadily growing because obesity, type 2 diabetes, and nonalcoholic fatty liver disease (NAFLD) are replacing viral- and alcohol-related liver disease as major pathogenic promotors. The most worrisome aspects of these new risk factors are their large spread in the general population and their link with HCC arising in noncirrhotic livers.

[0005] Current treatments of HCC are limited to resection (for small localized tumors), radiation, ablation, chemoembolization, liver transplantation, targeted drug therapy (Kinase inhibitors: Sorafenib, lenvatinib, Regorafenib, Cabozantinib. Monoclonal antibodies: Bevacizumab, Ramucirumab) and immune checkpoint inhibitors based immunotherapy. For many patients the only treatment offered is palliative. The all SEER (Surveillance, Epidemiology, and End Results) stage combined 5-year relative survival rate for liver cancer is 18% (Localized: 33%, Regional: 11%, Distant: 2%). Therefore, the development of more effective therapies remains a pressing field of research.

### SUMMARY

[0006] This disclosure provides antibodies, antigen-binding fragments, protein constructs, and chimeric antigen receptors that bind to a complex comprising an AFP peptide and an MHC molecule, and also the methods of treating cancer, e.g., hepatocellular carcinoma (HCC).

[0007] In one aspect, the disclosure relates to an antibody or antigen-binding fragment thereof that binds to a complex comprising an AFP peptide and an MHC molecule, comprising: a heavy chain variable region (VH) comprising VH complementarity determining regions (CDRs) 1, 2, and 3; and a light chain variable region (VL) comprising VL CDRs 1, 2, and 3, wherein:
[0008] (a) the VH CDR1 comprises GFTFSSYAMS (SEQ ID NO:78 or 121);
[0009] (b) the VH CDR2 comprises TINX₁GTX₂X₃X₄YYADSVKG (SEQ ID NO: 341) or AINSGGGSTYYADSVKG (SEQ ID NO: 123); and
[0010] (c) the VH CDR3 comprises NFX₅X₆GSX₇X₈X₉X₁₀X₁₁X₁₂AMDY (SEQ ID NO: 342) or AASGYGGSWWGDATLDA (SEQ ID NO: 125);
[0011] (d) the VL CDR1 comprises AGTSSDVGSX₁₃NX₁₄VS (SEQ ID NO: 343) or QGGGYYVN (SEQ ID NO: 129);
[0012] (e) the VL CDR2 comprises QVNKRAS (SEQ ID NO: 88) or LNTNRPS (SEQ ID NO: 131); and
[0013] (f) the VL CDR3 comprises ASX₁₅RSSX₁₆X₁₇NIV (SEQ ID NO: 344);
[0014] and wherein:
[0015] X₁ is S, A, or T;
[0016] X₂ is G, A, D, E, F, H, I, K, L, M, N, P, Q, R, S, T, V, W, or Y;
[0017] X₃ is S, A, D, F, H, K, M, N, Q, R, T, W, or Y;
[0018] X₄ is P, A, D, E, F, G, H, K, M, N, Q, R, S, T, V, W, or Y;
[0019] X₅ is F, D, H, N, W, or Y;
[0020] X₆ is D, A, E, G, I, L, M, N, P, Q, S, T, V, or W;
[0021] X₇ is W, F, or M;
[0022] X₈ is F, or W;
[0023] X₉ is L, A, G, I, M, N, Q, S, T, or V;
[0024] X₁₀ is G, A, D, E, F, H, I, L, M, N, Q, R, S, T, V, W, or Y;
[0025] X₁₁ is P, A, N, or T;
[0026] X₁₂ is P, A, D, E, G, I, L, N, Q, S, T, or V;
[0027] X₁₃ is E, A, D, G, H, I, L, M, N, P, Q, S, T, V, W, or Y;
[0028] X₁₄ is Y, A, D, E, F, G, H, I, L, M, P, S, T, V, or W;
[0029] X₁₅ is Y, D, F, H, I, L, M, N, Q, T, V, or W;
[0030] X₁₆ is D, A, E, F, G, H, I, K, L, M, N, P, Q, R, S, T, V, W, or Y; and
[0031] X₁₇ is H, A, D, F, G, I, K, L, M, N, P, Q, R, S, T, V, W, or Y.

[0032] In some embodiments, X₁ is S; X₂ is G, A, D, E, F, H, K, L, M, N, Q, R, S, T, W, or Y; X₃ is S, A, D, F, H, K, M, N, Q, R, T, W, or Y; X₄ is P, A, E, G, or Q; X₅ is F, W, or Y; X₆ is D or E; X₇ is W; X₈ is F; X₉ is L, I, M, or N; X₁₀ is G, A, D, E, L, M, N, Q, S, T, or V; X₁₁ is P; X₁₂ is P, A, D, E, G, Q, S, T, or V; X₁₃ is E, D, G, S, W, or Y; X₁₄ is Y, H, or W; X₁₅ is Y, F, I, L, M, Q, V, or W; X₁₆ is D, A, F, G, H, K, N, R, S, or T; and X₁₇ is H, A, F, G, I, L, M, N, P, Q, R, S, T, V, W, or Y.

[0033] In some embodiments, X₁ is S; X₂ is G, Y, N, or F; X₃ is S, R, Q, M, K, or H; X₄ is P; X₅ is F; X₆ is D; X₇ is W; X₈ is F; X₉ is L; X₁₀ is G, S, N, M, E, D, or A; Xᵤ is P; X₁₂ is P; X₁₃ is E, or W; X₁₄ is Y; X₁₅ is Y; X₁₆ is D; and X₁₇ is H, V, T, Q, P, I, F, or A.

[0034] In some embodiments, one or more of the following are true: (1) X₂ is Y; (2) X₃ is K or H; (3) X₁₀ is D or A; (4) X₂ is N and X₁₇ is I; (5) X₃ is M and X₁₇ is Q; (6) X₂ is N and X₁₀ is A; (7) X₃ is K and X₁₀ is S; (8) X₁₇ is I and X₁₀ is A; (9) X₂ is Y, X₁₇ is I, and X₁₀ is S; or (10) X₂ is Y, X₁₇ is Q and X₁₀ is S.

[0035] In one aspect, the disclosure relates to an antibody or antigen-binding fragment thereof that binds to a complex comprising an AFP peptide and an MHC molecule, comprising: a heavy chain variable region (VH) comprising VH complementarity determining regions (CDRs) 1, 2, and 3; and a light chain variable region (VL) comprising VL CDRs 1, 2, and 3, wherein:
[0036] (a) the VH CDR1 comprises GFTFLNYAMS (SEQ ID NO:95);
[0037] (b) the VH CDR2 comprises SNSGAGSTYYSDSVKG (SEQ ID NO:97) or SNSGAGSTYYADSVKG (SEQ ID NO:337); and
[0038] (c) the VH CDR3 comprises GTNVGSWSSLHY (SEQ ID NO: 99);
[0039] (d) the VL CDR1 comprises TGSSNNIGGNYVN (SEQ ID NO: 103), TGSSSNIGGNYVN (SEQ ID NO: 112), SGSSNNIGGNYVN (SEQ ID NO: 338), or SGSSSNIGGNYVN (SEQ ID NO: 339);
[0040] (e) the VL CDR2 comprises DNKNRPS (SEQ ID NO: 105) or DNSNRAS (SEQ ID NO: 114); and
[0041] (f) the VL CDR3 comprises ASWDDSLSAVV (SEQ ID NO: 107) or ASWDDSLSGAV (SEQ ID NO: 116).

[0042] In some embodiments, the antibody or antigen-binding fragment thereof comprises a VH that is at least 80%, 85%, 90%, 91%, 92%, 93%, 94%, 95%, 96%, 97%, 98%, 99% or 100% identical to SEQ ID NO: 76, 93, 119, 136, 168, 169, 172, 173,174, 179, 180, 368, 377, 386, 395, or 404; and a VL that is at least 80%, 85%, 90%, 91%, 92%, 93%, 94%, 95%, 96%, 97%, 98%, 99% or 100% identical to SEQ ID NO: 84, 101, 110, 127, 144, 170, 171, 175, 176, 177, 178, 181, 182, 369, 378, 387, 396, or 405.

[0043] In some embodiments, the antibody or antigen-binding fragment thereof comprises a VH that is at least 80%, 85%, 90%, 91%, 92%, 93%, 94%, 95%, 96%, 97%, 98%, 99% or 100% identical to amino acids 127-251 of SEQ ID NO: 191-296; and a VL that is at least 80%, 85%, 90%, 91%, 92%, 93%, 94%, 95%, 96%, 97%, 98%, 99% or 100% identical to amino acids 1-111 of SEQ ID NO: 191-296.

[0044] In some embodiments, the antibody or antigen-binding fragment thereof is a scFv.

[0045] In some embodiments, the antibody or antigen-binding fragment thereof comprises a sequence that is at least 80%, 85%, 90%, 91%, 92%, 93%, 94%, 95%, 96%, 97%, 98%, 99% or 100% identical to a sequence selected from SEQ ID NO: 75, 92, 109, 118, 135, 183, 185, 187, 189, 367, 376, 385, 394, 403, and 191-296.

[0046] In some embodiments, the antibody or antigen-binding fragment thereof comprises a sequence selected from SEQ ID NOs: 183, 185, 187, 189, 199, 205, 206, 211, 212, 217, 227, 231, 239, 246, 257, and 260.

[0047] In one aspect, the disclosure relates to an antibody or antigen-binding fragment thereof that binds to a complex comprising an AFP peptide and an MHC molecule, comprising: a heavy chain variable region (VH) comprising complementarity determining regions (CDRs) 1, 2, and 3, wherein the VH CDR1 region comprises an amino acid sequence that is at least 80% identical to a selected VH CDR1 amino acid sequence, the VH CDR2 region comprises an amino acid sequence that is at least 80% identical to a selected VH CDR2 amino acid sequence, and the VH CDR3 region comprises an amino acid sequence that is at least 80% identical to a selected VH CDR3 amino acid sequence; and a light chain variable region (VL) comprising CDRs 1, 2, and 3, wherein the VL CDR1 region comprises an amino acid sequence that is at least 80% identical to a selected VL CDR1 amino acid sequence, the VL CDR2 region comprises an amino acid sequence that is at least 80% identical to a selected VL CDR2 amino acid sequence, and the VL CDR3 region comprises an amino acid sequence that is at least 80% identical to a selected VL CDR3 amino acid sequence.

[0048] In some embodiments, the selected VH CDRs 1, 2, 3 amino acid sequences are set forth in SEQ ID NOs: 78, 80, and 82, respectively, and the selected VL CDRs 1, 2, 3 amino acid sequences are set forth in SEQ ID NOs: 86, 88, and 90 respectively.

[0049] In some embodiments, the selected VH CDRs 1, 2, 3 amino acid sequences are set forth in SEQ ID NOs: 95, 97, and 99, respectively, and the selected VL CDRs 1, 2, 3 amino acid sequences are set forth in SEQ ID NOs: 103, 105, and 107, respectively.

[0050] In some embodiments, the selected VH CDRs 1, 2, 3 amino acid sequences are set forth in SEQ ID NOs: 95, 97, and 99, respectively, and the selected VL CDRs 1, 2, 3 amino acid sequences are set forth in SEQ ID NOs: 112, 114, and 116, respectively.

[0051] In some embodiments, the selected VH CDRs 1, 2, 3 amino acid sequences are set forth in SEQ ID NOs: 121, 123, and 125, respectively, and the selected VL CDRs 1, 2, 3 amino acid sequences are set forth in SEQ ID NOs: 129, 131, and 133, respectively.

[0052] In some embodiments, the selected VH CDRs 1, 2, 3 amino acid sequences are set forth in SEQ ID NOs: 138, 140, and 142, respectively, and the selected VL CDRs 1, 2, 3 amino acid sequences are set forth in SEQ ID NOs: 146, 148, and 150, respectively.

[0053] In some embodiments, the selected VH CDRs 1, 2, 3 amino acid sequences are set forth in SEQ ID NOs: 95, 337, and 99, respectively, and the selected VL CDRs 1, 2, 3 amino acid sequences are set forth in SEQ ID NOs: 338, 105, and 107, respectively.

[0054] In some embodiments, the selected VH CDRs 1, 2, 3 amino acid sequences are set forth in SEQ ID NOs: 95, 337, and 99, respectively, and the selected VL CDRs 1, 2, 3 amino acid sequences are set forth in SEQ ID NOs: 339, 114, and 116, respectively.

[0055] In some embodiments, the selected VH CDRs 1, 2, 3 amino acid sequences are set forth in SEQ ID NOs: 121, 123, and 125, respectively, and the selected VL CDRs 1, 2, 3 amino acid sequences are set forth in SEQ ID NOs: 129, 131, and 133, respectively.

[0056] In some embodiments, the selected VH CDRs 1, 2, 3 amino acid sequences are set forth in SEQ ID NOs: 370, 371, and 372, respectively, and the selected VL CDRs 1, 2, 3 amino acid sequences are set forth in SEQ ID NOs: 373, 374, and 375, respectively.

[0057] In some embodiments, the selected VH CDRs 1, 2, 3 amino acid sequences are set forth in SEQ ID NOs: 379, 380, and 381, respectively, and the selected VL CDRs 1, 2, 3 amino acid sequences are set forth in SEQ ID NOs: 382, 383, and 384, respectively.

[0058] In some embodiments, the selected VH CDRs 1, 2, 3 amino acid sequences are set forth in SEQ ID NOs: 388, 389, and 390, respectively, and the selected VL CDRs 1, 2, 3 amino acid sequences are set forth in SEQ ID NOs: 391, 392, and 393, respectively.

[0059] In some embodiments, the selected VH CDRs 1, 2, 3 amino acid sequences are set forth in SEQ ID NOs: 397, 398, and 399, respectively, and the selected VL CDRs 1, 2, 3 amino acid sequences are set forth in SEQ ID NOs: 400, 401, and 402, respectively.

[0060] In some embodiments, the selected VH CDRs 1, 2, 3 amino acid sequences are set forth in SEQ ID NOs: 406, 407, and 408, respectively, and the selected VL CDRs 1, 2, 3 amino acid sequences are set forth in SEQ ID NOs: 409, 410, and 411, respectively.

[0061] In some embodiments, the selected VH CDRs 1, 2, 3 amino acid sequences are set forth in SEQ ID NOs: 95, 97, and 99, respectively, and the selected VL CDRs 1, 2, 3 amino acid sequences are set forth in SEQ ID NOs: 338, 105, and 107 respectively.

[0062] In some embodiments, the selected VH CDRs 1, 2, 3 amino acid sequences are set forth in SEQ ID NOs: 95, 97, and 99, respectively, and the selected VL CDRs 1, 2, 3 amino acid sequences are set forth in SEQ ID NOs: 339, 114, and 116 respectively.

[0063] In some embodiments, the selected VH CDRs 1, 2, 3 amino acid sequences are set forth in SEQ ID NOs: 95, 336, and 99, respectively, and the selected VL CDRs 1, 2, 3 amino acid sequences are set forth in SEQ ID NOs: 103, 105, and 107 respectively.

[0064] In some embodiments, the selected VH CDRs 1, 2, 3 amino acid sequences are set forth in SEQ ID NOs: 95, 336, and 99, respectively, and the selected VL CDRs 1, 2, 3 amino acid sequences are set forth in SEQ ID NOs: 112, 114, and 116 respectively.

[0065] In some embodiments, the selected VH CDRs 1, 2, 3 amino acid sequences are set forth in SEQ ID NOs: 95, 336, and 99, respectively, and the selected VL CDRs 1, 2, 3 amino acid sequences are set forth in SEQ ID NOs: 338, 105, and 107 respectively.

[0066] In some embodiments, the selected VH CDRs 1, 2, 3 amino acid sequences are set forth in SEQ ID NOs: 95, 336, and 99, respectively, and the selected VL CDRs 1, 2, 3 amino acid sequences are set forth in SEQ ID NOs: 339, 114, and 116 respectively.

[0067] In some embodiments, the selected VH CDRs 1, 2, 3 amino acid sequences are set forth in SEQ ID NOs: 121, 340, and 125, respectively, and the selected VL CDRs 1, 2, 3 amino acid sequences are set forth in SEQ ID NOs: 129, 131, and 133, respectively.

[0068] In one aspect, the disclosure relates to an antibody or antigen-binding fragment thereof that binds to a complex comprising an AFP peptide and an MHC molecule, comprising: a heavy chain variable region (VH) comprising complementarity determining regions (CDRs) 1, 2, and 3, wherein the VH CDR1 region comprises an amino acid sequence that is at least 80% identical to a selected VH CDR1 amino acid sequence, the VH CDR2 region comprises an amino acid sequence that is at least 80% identical to a selected VH CDR2 amino acid sequence, and the VH CDR3 region comprises an amino acid sequence that is at least 80% identical to a selected VH CDR3 amino acid sequence; and a light chain variable region (VL) comprising CDRs 1, 2, and 3, wherein the VL CDR1 region comprises an amino acid sequence that is at least 80% identical to a selected VL CDR1 amino acid sequence, the VL CDR2 region comprises an amino acid sequence that is at least 80% identical to a selected VL CDR2 amino acid sequence, and the VL CDR3 region comprises an amino acid sequence that is at least 80% identical to a selected VL CDR3 amino acid sequence.

[0069] In some embodiments, the selected VH CDRs 1, 2, 3 amino acid sequences are set forth in SEQ ID NOs: 78, 80, and 82, respectively, and the selected VL CDRs 1, 2, 3 amino acid sequences are set forth in SEQ ID NOs: 86, 88, and 345, respectively.

[0070] In some embodiments, the selected VH CDRs 1, 2, 3 amino acid sequences are set forth in SEQ ID NOs: 78, 80, and 82, respectively, and the selected VL CDRs 1, 2, 3 amino acid sequences are set forth in SEQ ID NOs: 86, 88, and 346, respectively.

[0071] In some embodiments, the selected VH CDRs 1, 2, 3 amino acid sequences are set forth in SEQ ID NOs: 78, 80, and 82, respectively, and the selected VL CDRs 1, 2, 3 amino acid sequences are set forth in SEQ ID NOs: 86, 88, and 347, respectively.

[0072] In some embodiments, the selected VH CDRs 1, 2, 3 amino acid sequences are set forth in SEQ ID NOs: 78, 80, and 82, respectively, and the selected VL CDRs 1, 2, 3 amino acid sequences are set forth in SEQ ID NOs: 86, 88, and 348, respectively.

[0073] In some embodiments, the selected VH CDRs 1, 2, 3 amino acid sequences are set forth in SEQ ID NOs: 78, 80, and 82, respectively, and the selected VL CDRs 1, 2, 3 amino acid sequences are set forth in SEQ ID NOs: 86, 88, and 349, respectively.

[0074] In some embodiments, the selected VH CDRs 1, 2, 3 amino acid sequences are set forth in SEQ ID NOs: 78, 80, and 82, respectively, and the selected VL CDRs 1, 2, 3 amino acid sequences are set forth in SEQ ID NOs: 86, 88, and 350, respectively.

[0075] In some embodiments, the selected VH CDRs 1, 2, 3 amino acid sequences are set forth in SEQ ID NOs: 78, 80, and 82, respectively, and the selected VL CDRs 1, 2, 3 amino acid sequences are set forth in SEQ ID NOs: 86, 88, and 351, respectively.

[0076] In some embodiments, the selected VH CDRs 1, 2, 3 amino acid sequences are set forth in SEQ ID NOs: 78, 80, and 82, respectively, and the selected VL CDRs 1, 2, 3 amino acid sequences are set forth in SEQ ID NOs: 352, 88, and 90, respectively.

[0077] In some embodiments, the selected VH CDRs 1, 2, 3 amino acid sequences are set forth in SEQ ID NOs: 78, 353, and 82, respectively, and the selected VL CDRs 1, 2, 3 amino acid sequences are set forth in SEQ ID NOs: 86, 88, and 90, respectively.

[0078] In some embodiments, the selected VH CDRs 1, 2, 3 amino acid sequences are set forth in SEQ ID NOs: 78, 354, and 82, respectively, and the selected VL CDRs 1, 2, 3 amino acid sequences are set forth in SEQ ID NOs: 86, 88, and 90, respectively.

[0079] In some embodiments, the selected VH CDRs 1, 2, 3 amino acid sequences are set forth in SEQ ID NOs: 78, 355, and 82, respectively, and the selected VL CDRs 1, 2, 3 amino acid sequences are set forth in SEQ ID NOs: 86, 88, and 90, respectively.

[0080] In some embodiments, the selected VH CDRs 1, 2, 3 amino acid sequences are set forth in SEQ ID NOs: 78, 356, and 82, respectively, and the selected VL CDRs 1, 2, 3 amino acid sequences are set forth in SEQ ID NOs: 86, 88, and 90, respectively.

[0081] In some embodiments, the selected VH CDRs 1, 2, 3 amino acid sequences are set forth in SEQ ID NOs: 78, 357, and 82, respectively, and the selected VL CDRs 1, 2, 3 amino acid sequences are set forth in SEQ ID NOs: 86, 88, and 90, respectively.

[0082] In some embodiments, the selected VH CDRs 1, 2, 3 amino acid sequences are set forth in SEQ ID NOs: 78, 358, and 82, respectively, and the selected VL CDRs 1, 2, 3 amino acid sequences are set forth in SEQ ID NOs: 86, 88, and 90, respectively.

[0083] In some embodiments, the selected VH CDRs 1, 2, 3 amino acid sequences are set forth in SEQ ID NOs: 78, 359, and 82, respectively, and the selected VL CDRs 1, 2, 3 amino acid sequences are set forth in SEQ ID NOs: 86, 88, and 90, respectively.

[0084] In some embodiments, the selected VH CDRs 1, 2, 3 amino acid sequences are set forth in SEQ ID NOs: 78, 360, and 82, respectively, and the selected VL CDRs 1, 2, 3 amino acid sequences are set forth in SEQ ID NOs: 86, 88, and 90, respectively.

[0085] In some embodiments, the selected VH CDRs 1, 2, 3 amino acid sequences are set forth in SEQ ID NOs: 78, 80, and 361, respectively, and the selected VL CDRs 1, 2, 3 amino acid sequences are set forth in SEQ ID NOs: 86, 88, and 90, respectively.

[0086] In some embodiments, the selected VH CDRs 1, 2, 3 amino acid sequences are set forth in SEQ ID NOs: 78, 80, and 362, respectively, and the selected VL CDRs 1, 2, 3 amino acid sequences are set forth in SEQ ID NOs: 86, 88, and 90, respectively.

[0087] In some embodiments, the selected VH CDRs 1, 2, 3 amino acid sequences are set forth in SEQ ID NOs: 78, 80, and 363, respectively, and the selected VL CDRs 1, 2, 3 amino acid sequences are set forth in SEQ ID NOs: 86, 88, and 90, respectively.

[0088] In some embodiments, the selected VH CDRs 1, 2, 3 amino acid sequences are set forth in SEQ ID NOs: 78, 80, and 364, respectively, and the selected VL CDRs 1, 2, 3 amino acid sequences are set forth in SEQ ID NOs: 86, 88, and 90, respectively.

[0089] In some embodiments, the selected VH CDRs 1, 2, 3 amino acid sequences are set forth in SEQ ID NOs: 78, 80, and 365, respectively, and the selected VL CDRs 1, 2, 3 amino acid sequences are set forth in SEQ ID NOs: 86, 88, and 90, respectively.

[0090] In some embodiments, the selected VH CDRs 1, 2, 3 amino acid sequences are set forth in SEQ ID NOs: 78, 80, and 366, respectively, and the selected VL CDRs 1, 2, 3 amino acid sequences are set forth in SEQ ID NOs: 86, 88, and 90, respectively.

[0091] In some embodiments, the selected VH CDRs 1, 2, 3 amino acid sequences are set forth in SEQ ID NOs: 78, 353, and 82, respectively, and the selected VL CDRs 1, 2, 3 amino acid sequences are set forth in SEQ ID NOs: 86, 88, and 350, respectively.

[0092] In some embodiments, the selected VH CDRs 1, 2, 3 amino acid sequences are set forth in SEQ ID NOs: 78, 353, and 82, respectively, and the selected VL CDRs 1, 2, 3 amino acid sequences are set forth in SEQ ID NOs: 86, 88, and 349, respectively.

[0093] In some embodiments, the selected VH CDRs 1, 2, 3 amino acid sequences are set forth in SEQ ID NOs: 78, 353, and 82, respectively, and the selected VL CDRs 1, 2, 3 amino acid sequences are set forth in SEQ ID NOs: 86, 88, and 347, respectively.

[0094] In some embodiments, the selected VH CDRs 1, 2, 3 amino acid sequences are set forth in SEQ ID NOs: 78, 354, and 82, respectively, and the selected VL CDRs 1, 2, 3 amino acid sequences are set forth in SEQ ID NOs: 86, 88, and 350, respectively.

[0095] In some embodiments, the selected VH CDRs 1, 2, 3 amino acid sequences are set forth in SEQ ID NOs: 78, 354, and 82, respectively, and the selected VL CDRs 1, 2, 3 amino acid sequences are set forth in SEQ ID NOs: 86, 88, and 349, respectively.

[0096] In some embodiments, the selected VH CDRs 1, 2, 3 amino acid sequences are set forth in SEQ ID NOs: 78, 354, and 82, respectively, and the selected VL CDRs 1, 2, 3 amino acid sequences are set forth in SEQ ID NOs: 86, 88, and 347, respectively.

[0097] In some embodiments, the selected VH CDRs 1, 2, 3 amino acid sequences are set forth in SEQ ID NOs: 78, 360, and 82, respectively, and the selected VL CDRs 1, 2, 3 amino acid sequences are set forth in SEQ ID NOs: 86, 88, and 350, respectively.

[0098] In some embodiments, the selected VH CDRs 1, 2, 3 amino acid sequences are set forth in SEQ ID NOs: 78, 360, and 82, respectively, and the selected VL CDRs 1, 2, 3 amino acid sequences are set forth in SEQ ID NOs: 86, 88, and 349, respectively.

[0099] In some embodiments, the selected VH CDRs 1, 2, 3 amino acid sequences are set forth in SEQ ID NOs: 78, 360, and 82, respectively, and the selected VL CDRs 1, 2, 3 amino acid sequences are set forth in SEQ ID NOs: 86, 88, and 347, respectively.

[0100] In some embodiments, the selected VH CDRs 1, 2, 3 amino acid sequences are set forth in SEQ ID NOs: 78, 359, and 82, respectively, and the selected VL CDRs 1, 2, 3 amino acid sequences are set forth in SEQ ID NOs: 86, 88, and 350, respectively.

[0101] In some embodiments, the selected VH CDRs 1, 2, 3 amino acid sequences are set forth in SEQ ID NOs: 78, 359, and 82, respectively, and the selected VL CDRs 1, 2, 3 amino acid sequences are set forth in SEQ ID NOs: 86, 88, and 349, respectively.

[0102] In some embodiments, the selected VH CDRs 1, 2, 3 amino acid sequences are set forth in SEQ ID NOs: 78, 359, and 82, respectively, and the selected VL CDRs 1, 2, 3 amino acid sequences are set forth in SEQ ID NOs: 86, 88, and 347, respectively.

[0103] In some embodiments, the selected VH CDRs 1, 2, 3 amino acid sequences are set forth in SEQ ID NOs: 78, 358, and 82, respectively, and the selected VL CDRs 1, 2, 3 amino acid sequences are set forth in SEQ ID NOs: 86, 88, and 350, respectively.

[0104] In some embodiments, the selected VH CDRs 1, 2, 3 amino acid sequences are set forth in SEQ ID NOs: 78, 358, and 82, respectively, and the selected VL CDRs 1, 2, 3 amino acid sequences are set forth in SEQ ID NOs: 86, 88, and 349, respectively.

[0105] In some embodiments, the selected VH CDRs 1, 2, 3 amino acid sequences are set forth in SEQ ID NOs: 78, 358, and 82, respectively, and the selected VL CDRs 1, 2, 3 amino acid sequences are set forth in SEQ ID NOs: 86, 88, and 347, respectively.

[0106] In some embodiments, the selected VH CDRs 1, 2, 3 amino acid sequences are set forth in SEQ ID NOs: 78, 353, and 366, respectively, and the selected VL CDRs 1, 2, 3 amino acid sequences are set forth in SEQ ID NOs: 86, 88, and 90, respectively.

[0107] In some embodiments, the selected VH CDRs 1, 2, 3 amino acid sequences are set forth in SEQ ID NOs: 78, 353, and 365, respectively, and the selected VL CDRs 1, 2, 3 amino acid sequences are set forth in SEQ ID NOs: 86, 88, and 90, respectively.

[0108] In some embodiments, the selected VH CDRs 1, 2, 3 amino acid sequences are set forth in SEQ ID NOs: 78, 353, and 361, respectively, and the selected VL CDRs 1, 2, 3 amino acid sequences are set forth in SEQ ID NOs: 86, 88, and 90, respectively.

[0109] In some embodiments, the selected VH CDRs 1, 2, 3 amino acid sequences are set forth in SEQ ID NOs: 78, 354, and 366, respectively, and the selected VL CDRs 1, 2, 3 amino acid sequences are set forth in SEQ ID NOs: 86, 88, and 90, respectively.

[0110] In some embodiments, the selected VH CDRs 1, 2, 3 amino acid sequences are set forth in SEQ ID NOs: 78, 354, and 365, respectively, and the selected VL CDRs 1, 2, 3 amino acid sequences are set forth in SEQ ID NOs: 86, 88, and 90, respectively.

[0111] In some embodiments, the selected VH CDRs 1, 2, 3 amino acid sequences are set forth in SEQ ID NOs: 78, 354, and 361, respectively, and the selected VL CDRs 1, 2, 3 amino acid sequences are set forth in SEQ ID NOs: 86, 88, and 90, respectively.

[0112] In some embodiments, the selected VH CDRs 1, 2, 3 amino acid sequences are set forth in SEQ ID NOs: 78, 360, and 366, respectively, and the selected VL CDRs 1, 2, 3 amino acid sequences are set forth in SEQ ID NOs: 86, 88, and 90, respectively.

[0113] In some embodiments, the selected VH CDRs 1, 2, 3 amino acid sequences are set forth in SEQ ID NOs: 78, 360, and 365, respectively, and the selected VL CDRs 1, 2, 3 amino acid sequences are set forth in SEQ ID NOs: 86, 88, and 90, respectively.

[0114] In some embodiments, the selected VH CDRs 1, 2, 3 amino acid sequences are set forth in SEQ ID NOs: 78, 360, and 361, respectively, and the selected VL CDRs 1, 2, 3 amino acid sequences are set forth in SEQ ID NOs: 86, 88, and 90, respectively.

[0115] In some embodiments, the selected VH CDRs 1, 2, 3 amino acid sequences are set forth in SEQ ID NOs: 78, 359, and 366, respectively, and the selected VL CDRs 1, 2, 3 amino acid sequences are set forth in SEQ ID NOs: 86, 88, and 90, respectively.

[0116] In some embodiments, the selected VH CDRs 1, 2, 3 amino acid sequences are set forth in SEQ ID NOs: 78, 359, and 365, respectively, and the selected VL CDRs 1, 2, 3 amino acid sequences are set forth in SEQ ID NOs: 86, 88, and 90, respectively.

[0117] In some embodiments, the selected VH CDRs 1, 2, 3 amino acid sequences are set forth in SEQ ID NOs: 78, 359, and 361, respectively, and the selected VL CDRs 1, 2, 3 amino acid sequences are set forth in SEQ ID NOs: 86, 88, and 90, respectively.

[0118] In some embodiments, the selected VH CDRs 1, 2, 3 amino acid sequences are set forth in SEQ ID NOs: 78, 358, and 366, respectively, and the selected VL CDRs 1, 2, 3 amino acid sequences are set forth in SEQ ID NOs: 86, 88, and 90, respectively.

[0119] In some embodiments, the selected VH CDRs 1, 2, 3 amino acid sequences are set forth in SEQ ID NOs: 78, 358, and 365, respectively, and the selected VL CDRs 1, 2, 3 amino acid sequences are set forth in SEQ ID NOs: 86, 88, and 90, respectively.

[0120] In some embodiments, the selected VH CDRs 1, 2, 3 amino acid sequences are set forth in SEQ ID NOs: 78, 358, and 361, respectively, and the selected VL CDRs 1, 2, 3 amino acid sequences are set forth in SEQ ID NOs: 86, 88, and 90, respectively.

[0121] In some embodiments, the selected VH CDRs 1, 2, 3 amino acid sequences are set forth in SEQ ID NOs: 78, 80, and 366, respectively, and the selected VL CDRs 1, 2, 3 amino acid sequences are set forth in SEQ ID NOs: 86, 88, and 350, respectively.

[0122] In some embodiments, the selected VH CDRs 1, 2, 3 amino acid sequences are set forth in SEQ ID NOs: 78, 80, and 365, respectively, and the selected VL CDRs 1, 2, 3 amino acid sequences are set forth in SEQ ID NOs: 86, 88, and 350, respectively.

[0123] In some embodiments, the selected VH CDRs 1, 2, 3 amino acid sequences are set forth in SEQ ID NOs: 78, 80, and 361, respectively, and the selected VL CDRs 1, 2, 3 amino acid sequences are set forth in SEQ ID NOs: 86, 88, and 350, respectively.

[0124] In some embodiments, the selected VH CDRs 1, 2, 3 amino acid sequences are set forth in SEQ ID NOs: 78, 80, and 366, respectively, and the selected VL CDRs 1, 2, 3 amino acid sequences are set forth in SEQ ID NOs: 86, 88, and 349, respectively.

[0125] In some embodiments, the selected VH CDRs 1, 2, 3 amino acid sequences are set forth in SEQ ID NOs: 78, 80, and 365, respectively, and the selected VL CDRs 1, 2, 3 amino acid sequences are set forth in SEQ ID NOs: 86, 88, and 349, respectively.

[0126] In some embodiments, the selected VH CDRs 1, 2, 3 amino acid sequences are set forth in SEQ ID NOs: 78, 80, and 361, respectively, and the selected VL CDRs 1, 2, 3 amino acid sequences are set forth in SEQ ID NOs: 86, 88, and 349, respectively.

[0127] In some embodiments, the selected VH CDRs 1, 2, 3 amino acid sequences are set forth in SEQ ID NOs: 78, 80, and 366, respectively, and the selected VL CDRs 1, 2, 3 amino acid sequences are set forth in SEQ ID NOs: 86, 88, and 347, respectively.

[0128] In some embodiments, the selected VH CDRs 1, 2, 3 amino acid sequences are set forth in SEQ ID NOs: 78, 80, and 365, respectively, and the selected VL CDRs 1, 2, 3 amino acid sequences are set forth in SEQ ID NOs: 86, 88, and 347, respectively.

[0129] In some embodiments, the selected VH CDRs 1, 2, 3 amino acid sequences are set forth in SEQ ID NOs: 78, 80, and 361, respectively, and the selected VL CDRs 1, 2, 3 amino acid sequences are set forth in SEQ ID NOs: 86, 88, and 347, respectively.

[0130] In some embodiments, the selected VH CDRs 1, 2, 3 amino acid sequences are set forth in SEQ ID NOs: 78, 353, and 366, respectively, and the selected VL CDRs 1, 2, 3 amino acid sequences are set forth in SEQ ID NOs: 86, 88, and 350, respectively.

[0131] In some embodiments, the selected VH CDRs 1, 2, 3 amino acid sequences are set forth in SEQ ID NOs: 78, 353, and 365, respectively, and the selected VL CDRs 1, 2, 3 amino acid sequences are set forth in SEQ ID NOs: 86, 88, and 350, respectively.

[0132] In some embodiments, the selected VH CDRs 1, 2, 3 amino acid sequences are set forth in SEQ ID NOs: 78, 353, and 361, respectively, and the selected VL CDRs 1, 2, 3 amino acid sequences are set forth in SEQ ID NOs: 86, 88, and 350, respectively.

[0133] In some embodiments, the selected VH CDRs 1, 2, 3 amino acid sequences are set forth in SEQ ID NOs: 78, 353, and 366, respectively, and the selected VL CDRs 1, 2, 3 amino acid sequences are set forth in SEQ ID NOs: 86, 88, and 349, respectively.

[0134] In some embodiments, the selected VH CDRs 1, 2, 3 amino acid sequences are set forth in SEQ ID NOs: 78, 353, and 365, respectively, and the selected VL CDRs 1, 2, 3 amino acid sequences are set forth in SEQ ID NOs: 86, 88, and 349, respectively.

[0135] In some embodiments, the selected VH CDRs 1, 2, 3 amino acid sequences are set forth in SEQ ID NOs: 78, 353, and 361, respectively, and the selected VL CDRs 1, 2, 3 amino acid sequences are set forth in SEQ ID NOs: 86, 88, and 349, respectively.

[0136] In some embodiments, the selected VH CDRs 1, 2, 3 amino acid sequences are set forth in SEQ ID NOs: 78, 353, and 366, respectively, and the selected VL CDRs 1, 2, 3 amino acid sequences are set forth in SEQ ID NOs: 86, 88, and 347, respectively.

[0137] In some embodiments, the selected VH CDRs 1, 2, 3 amino acid sequences are set forth in SEQ ID NOs: 78, 353, and 365, respectively, and the selected VL CDRs 1, 2, 3 amino acid sequences are set forth in SEQ ID NOs: 86, 88, and 347, respectively.

[0138] In some embodiments, the selected VH CDRs 1, 2, 3 amino acid sequences are set forth in SEQ ID NOs: 78, 353, and 361, respectively, and the selected VL CDRs 1, 2, 3 amino acid sequences are set forth in SEQ ID NOs: 86, 88, and 347, respectively.

[0139] In some embodiments, the selected VH CDRs 1, 2, 3 amino acid sequences are set forth in SEQ ID NOs: 78, 354, and 366, respectively, and the selected VL CDRs 1, 2, 3 amino acid sequences are set forth in SEQ ID NOs: 86, 88, and 350, respectively.

[0140] In some embodiments, the selected VH CDRs 1, 2, 3 amino acid sequences are set forth in SEQ ID NOs: 78, 354, and 365, respectively, and the selected VL CDRs 1, 2, 3 amino acid sequences are set forth in SEQ ID NOs: 86, 88, and 350, respectively.

[0141] In some embodiments, the selected VH CDRs 1, 2, 3 amino acid sequences are set forth in SEQ ID NOs: 78, 354, and 361, respectively, and the selected VL CDRs 1, 2, 3 amino acid sequences are set forth in SEQ ID NOs: 86, 88, and 350, respectively.

[0142] In some embodiments, the selected VH CDRs 1, 2, 3 amino acid sequences are set forth in SEQ ID NOs: 78, 354, and 366, respectively, and the selected VL CDRs 1, 2, 3 amino acid sequences are set forth in SEQ ID NOs: 86, 88, and 349, respectively.

[0143] In some embodiments, the selected VH CDRs 1, 2, 3 amino acid sequences are set forth in SEQ ID NOs: 78, 354, and 365, respectively, and the selected VL CDRs 1, 2, 3 amino acid sequences are set forth in SEQ ID NOs: 86, 88, and 349, respectively.

[0144] In some embodiments, the selected VH CDRs 1, 2, 3 amino acid sequences are set forth in SEQ ID NOs: 78, 354, and 361, respectively, and the selected VL CDRs 1, 2, 3 amino acid sequences are set forth in SEQ ID NOs: 86, 88, and 349, respectively.

[0145] In some embodiments, the selected VH CDRs 1, 2, 3 amino acid sequences are set forth in SEQ ID NOs: 78, 354, and 366, respectively, and the selected VL CDRs 1, 2, 3 amino acid sequences are set forth in SEQ ID NOs: 86, 88, and 347, respectively.

[0146] In some embodiments, the selected VH CDRs 1, 2, 3 amino acid sequences are set forth in SEQ ID NOs: 78, 354, and 365, respectively, and the selected VL CDRs 1, 2, 3 amino acid sequences are set forth in SEQ ID NOs: 86, 88, and 347, respectively.

[0147] In some embodiments, the selected VH CDRs 1, 2, 3 amino acid sequences are set forth in SEQ ID NOs: 78, 354, and 361, respectively, and the selected VL CDRs 1, 2, 3 amino acid sequences are set forth in SEQ ID NOs: 86, 88, and 347, respectively.

[0148] In some embodiments, the selected VH CDRs 1, 2, 3 amino acid sequences are set forth in SEQ ID NOs: 78, 360, and 366, respectively, and the selected VL CDRs 1, 2, 3 amino acid sequences are set forth in SEQ ID NOs: 86, 88, and 350, respectively.

[0149] In some embodiments, the selected VH CDRs 1, 2, 3 amino acid sequences are set forth in SEQ ID NOs: 78, 360, and 365, respectively, and the selected VL CDRs 1, 2, 3 amino acid sequences are set forth in SEQ ID NOs: 86, 88, and 350, respectively.

[0150] In some embodiments, the selected VH CDRs 1, 2, 3 amino acid sequences are set forth in SEQ ID NOs: 78, 360, and 361, respectively, and the selected VL CDRs 1, 2, 3 amino acid sequences are set forth in SEQ ID NOs: 86, 88, and 350, respectively.

[0151] In some embodiments, the selected VH CDRs 1, 2, 3 amino acid sequences are set forth in SEQ ID NOs: 78, 360, and 366, respectively, and the selected VL CDRs 1, 2, 3 amino acid sequences are set forth in SEQ ID NOs: 86, 88, and 349, respectively.

[0152] In some embodiments, the selected VH CDRs 1, 2, 3 amino acid sequences are set forth in SEQ ID NOs: 78, 360, and 365, respectively, and the selected VL CDRs 1, 2, 3 amino acid sequences are set forth in SEQ ID NOs: 86, 88, and 349, respectively.

[0153] In some embodiments, the selected VH CDRs 1, 2, 3 amino acid sequences are set forth in SEQ ID NOs: 78, 360, and 361, respectively, and the selected VL CDRs 1, 2, 3 amino acid sequences are set forth in SEQ ID NOs: 86, 88, and 349, respectively.

[0154] In some embodiments, the selected VH CDRs 1, 2, 3 amino acid sequences are set forth in SEQ ID NOs: 78, 360, and 366, respectively, and the selected VL CDRs 1, 2, 3 amino acid sequences are set forth in SEQ ID NOs: 86, 88, and 347, respectively.

[0155] In some embodiments, the selected VH CDRs 1, 2, 3 amino acid sequences are set forth in SEQ ID NOs: 78, 360, and 365, respectively, and the selected VL CDRs 1, 2, 3 amino acid sequences are set forth in SEQ ID NOs: 86, 88, and 347, respectively.

[0156] In some embodiments, the selected VH CDRs 1, 2, 3 amino acid sequences are set forth in SEQ ID NOs: 78, 360, and 361, respectively, and the selected VL CDRs 1, 2, 3 amino acid sequences are set forth in SEQ ID NOs: 86, 88, and 347, respectively.

[0157] In some embodiments, the selected VH CDRs 1, 2, 3 amino acid sequences are set forth in SEQ ID NOs: 78, 359, and 366, respectively, and the selected VL CDRs 1, 2, 3 amino acid sequences are set forth in SEQ ID NOs: 86, 88, and 350, respectively.

[0158] In some embodiments, the selected VH CDRs 1, 2, 3 amino acid sequences are set forth in SEQ ID NOs: 78, 359, and 365, respectively, and the selected VL CDRs 1, 2, 3 amino acid sequences are set forth in SEQ ID NOs: 86, 88, and 350, respectively.

[0159] In some embodiments, the selected VH CDRs 1, 2, 3 amino acid sequences are set forth in SEQ ID NOs: 78, 359, and 361, respectively, and the selected VL CDRs 1, 2, 3 amino acid sequences are set forth in SEQ ID NOs: 86, 88, and 350, respectively.

[0160] In some embodiments, the selected VH CDRs 1, 2, 3 amino acid sequences are set forth in SEQ ID NOs: 78, 359, and 366, respectively, and the selected VL CDRs 1, 2, 3 amino acid sequences are set forth in SEQ ID NOs: 86, 88, and 349, respectively.

[0161] In some embodiments, the selected VH CDRs 1, 2, 3 amino acid sequences are set forth in SEQ ID NOs: 78, 359, and 365, respectively, and the selected VL CDRs 1, 2, 3 amino acid sequences are set forth in SEQ ID NOs: 86, 88, and 349, respectively.

[0162] In some embodiments, the selected VH CDRs 1, 2, 3 amino acid sequences are set forth in SEQ ID NOs: 78, 359, and 361, respectively, and the selected VL CDRs 1, 2, 3 amino acid sequences are set forth in SEQ ID NOs: 86, 88, and 349, respectively.

[0163] In some embodiments, the selected VH CDRs 1, 2, 3 amino acid sequences are set forth in SEQ ID NOs: 78, 359, and 366, respectively, and the selected VL CDRs 1, 2, 3 amino acid sequences are set forth in SEQ ID NOs: 86, 88, and 347, respectively.

[0164] In some embodiments, the selected VH CDRs 1, 2, 3 amino acid sequences are set forth in SEQ ID NOs: 78, 359, and 365, respectively, and the selected VL CDRs 1, 2, 3 amino acid sequences are set forth in SEQ ID NOs: 86, 88, and 347, respectively.

[0165] In some embodiments, the selected VH CDRs 1, 2, 3 amino acid sequences are set forth in SEQ ID NOs: 78, 359, and 361, respectively, and the selected VL CDRs 1, 2, 3 amino acid sequences are set forth in SEQ ID NOs: 86, 88, and 347, respectively.

[0166] In some embodiments, the selected VH CDRs 1, 2, 3 amino acid sequences are set forth in SEQ ID NOs: 78, 358, and 366, respectively, and the selected VL CDRs 1, 2, 3 amino acid sequences are set forth in SEQ ID NOs: 86, 88, and 350, respectively.

[0167] In some embodiments, the selected VH CDRs 1, 2, 3 amino acid sequences are set forth in SEQ ID NOs: 78, 358, and 365, respectively, and the selected VL CDRs 1, 2, 3 amino acid sequences are set forth in SEQ ID NOs: 86, 88, and 350, respectively.

[0168] In some embodiments, the selected VH CDRs 1, 2, 3 amino acid sequences are set forth in SEQ ID NOs: 78, 358, and 361, respectively, and the selected VL CDRs 1, 2, 3 amino acid sequences are set forth in SEQ ID NOs: 86, 88, and 350, respectively.

[0169] In some embodiments, the selected VH CDRs 1, 2, 3 amino acid sequences are set forth in SEQ ID NOs: 78, 358, and 366, respectively, and the selected VL CDRs 1, 2, 3 amino acid sequences are set forth in SEQ ID NOs: 86, 88, and 349, respectively.

[0170] In some embodiments, the selected VH CDRs 1, 2, 3 amino acid sequences are set forth in SEQ ID NOs: 78, 358, and 365, respectively, and the selected VL CDRs 1, 2, 3 amino acid sequences are set forth in SEQ ID NOs: 86, 88, and 349, respectively.

[0171] In some embodiments, the selected VH CDRs 1, 2, 3 amino acid sequences are set forth in SEQ ID NOs: 78, 358, and 361, respectively, and the selected VL CDRs 1, 2, 3 amino acid sequences are set forth in SEQ ID NOs: 86, 88, and 349, respectively.

[0172] In some embodiments, the selected VH CDRs 1, 2, 3 amino acid sequences are set forth in SEQ ID NOs: 78, 358, and 366, respectively, and the selected VL CDRs 1, 2, 3 amino acid sequences are set forth in SEQ ID NOs: 86, 88, and 347, respectively.

[0173] In some embodiments, the selected VH CDRs 1, 2, 3 amino acid sequences are set forth in SEQ ID NOs: 78, 358, and 365, respectively, and the selected VL CDRs 1, 2, 3 amino acid sequences are set forth in SEQ ID NOs: 86, 88, and 347, respectively.

[0174] In some embodiments, the selected VH CDRs 1, 2, 3 amino acid sequences are set forth in SEQ ID NOs: 78, 358, and 361, respectively, and the selected VL CDRs 1, 2, 3 amino acid sequences are set forth in SEQ ID NOs: 86, 88, and 347, respectively.

[0175] In some embodiments, the antibody or antigen-binding fragment is a single-chain variable fragment (scFv).

[0176] In some embodiments, the antibody or antigen-binding fragment specifically binds to a complex comprising a human AFP peptide and an MHC molecule.

[0177] In some embodiments, the AFP peptide comprises a sequence that is at least 80%, 85%, 90%, 95%, or 100% identical to the amino acid sequence of SEQ ID NO: 3.

[0178] In some embodiments, the antibody or antigen-binding fragment is a humanized antibody or antigen-binding fragment thereof.

[0179] In some embodiments, the antibody or antigen-binding fragment is a chimeric antibody or antigen-binding fragment thereof or a human antibody or antigen-binding fragment thereof.

[0180] In some embodiments, the MHC molecule is HLA-A*02:01.

[0181] In one aspect, the disclosure relates to an antibody or antigen-binding fragment thereof that binds to a complex comprising an AFP peptide and an MHC molecule, comprising a heavy chain variable region (VH) comprising an amino acid sequence that is at least 80%, 85%, 90%, 95% or 100% identical to a selected VH sequence, and a light chain variable region (VL) comprising an amino acid sequence that is at least 80%, 85%, 90%, 95% or 100% identical to a selected VL sequence.

[0182] In one aspect, the disclosure relates to an antibody or antigen-binding fragment thereof that binds to a complex comprising an AFP peptide and an MHC molecule, comprising a heavy chain variable region (VH) comprising VH CDR1, VH CDR2, and VH CDR3 that are identical to VH CDR1, VH CDR2, and VH CDR3 of a selected VH sequence, and a light chain variable region (VL) comprising VL CDR1, VL CDR2, and VL CDR3 that are identical to VL CDR1, VL CDR2, and VL CDR3 of a selected VL sequence.

[0183] In some embodiments, the selected VH sequence is SEQ ID NO: 76, 168, or 169 and the selected VL sequence is SEQ ID NO: 84, 170, or 171.

[0184] In some embodiments, the selected VH sequence is SEQ ID NO: 93, 172, 173, or 174, and the selected VL sequence is SEQ ID NO: 101, 110, 175, 176, 177, or 178.

[0185] In some embodiments, the selected VH sequence is SEQ ID NO: 119, 179, or 180, and the selected VL sequence is SEQ ID NO: 127, 181, or 182.

[0186] In some embodiments, the selected VH sequence is SEQ ID NO: 136, and the selected VL sequence is SEQ ID NO: 144.

[0187] In some embodiments, the selected VH sequence is SEQ ID NO: 168, and the selected VL sequence is SEQ ID NO: 170.

[0188] In some embodiments, the selected VH sequence is SEQ ID NO: 174, and the selected VL sequence is SEQ ID NO: 176.

[0189] In some embodiments, the selected VH sequence is SEQ ID NO: 174, and the selected VL sequence is SEQ ID NO: 178.

[0190] In some embodiments, the selected VH sequence is SEQ ID NO: 179, and the selected VL sequence is SEQ ID NO: 181.

[0191] In some embodiments, the selected VH sequence is SEQ ID NO: 368, and the selected VL sequence is SEQ ID NO: 369.

[0192] In some embodiments, the selected VH sequence is SEQ ID NO: 377, and the selected VL sequence is SEQ ID NO: 378.

[0193] In some embodiments, the selected VH sequence is SEQ ID NO: 386, and the selected VL sequence is SEQ ID NO: 387.

[0194] In some embodiments, the selected VH sequence is SEQ ID NO: 395, and the selected VL sequence is SEQ ID NO: 396.

[0195] In some embodiments, the selected VH sequence is SEQ ID NO: 404, and the selected VL sequence is SEQ ID NO: 405.

[0196] In some embodiments, the selected VH sequence is a sequence that is identical to amino acids 127-251 of SEQ ID NO: 191-296, and the selected VL sequence is a sequence that is identical to amino acids 1-111 of SEQ ID NO: 191-296.

[0197] In one aspect, the disclosure relates to an antibody or antigen-binding fragment thereof that binds to a complex comprising an AFP peptide and an MHC molecule, comprising: a heavy chain single variable domain (V_{H}H) comprising complementarity determining regions (CDRs) 1, 2, and 3, wherein the V_{H}H CDR1 region comprises an amino acid sequence that is at least 80% identical to a selected V_{H}H CDR1 amino acid sequence, the V_{H}H CDR2 region comprises an amino acid sequence that is at least 80% identical to a selected V_{H}H CDR2 amino acid sequence, and the V_{H}H CDR3 region comprises an amino acid sequence that is at least 80% identical to a selected V_{H}H CDR3 amino acid sequence.

[0198] In some embodiments, the selected V_{H}H CDRs 1, 2, 3 amino acid sequences are set forth in SEQ ID NOs: 154, 156, 158, respectively.

[0199] In some embodiments, the selected V_{H}H CDRs 1, 2, 3 amino acid sequences are set forth in SEQ ID NOs: 162, 164, and 166, respectively.

[0200] In one aspect, the disclosure relates to an antibody or antigen-binding fragment thereof that binds to a complex comprising a human AFP peptide and an MHC molecule, comprising a heavy chain single variable region (V_{H}H) comprising an amino acid sequence that is at least 80% identical to a selected V_{H}H sequence, wherein the selected V_{H}H sequence is SEQ ID NO: 152 or SEQ ID NO: 160.

[0201] In one aspect, the disclosure relates to an antibody or antigen-binding fragment thereof that binds to a complex comprising an AFP peptide and an MHC molecule, comprising a heavy chain single variable region (V_{H}H) comprising V_{H}H CDR1, V_{H}H CDR2, and V_{H}H CDR3 that are identical to V_{H}H CDR1, V_{H}H CDR2, and V_{H}H CDR3 in a selected V_{H}H sequence, wherein the selected V_{H}H sequence is SEQ ID NO: 152 or SEQ ID NO: 160.

[0202] In some embodiments, the AFP peptide comprises SEQ ID NO: 3.

[0203] In some embodiments, the antibody or antigen-binding fragment is a humanized antibody or antigen-binding fragment thereof.

[0204] In some embodiments, the antibody or antigen-binding fragment comprises a human IgG Fc.

[0205] In some embodiments, the antibody or antigen-binding fragment comprises two or more V_{H}Hs.

[0206] In some embodiments, the MHC molecule is HLA-A*02:01.

[0207] In one aspect, the disclosure relates to an antibody or antigen-binding fragment thereof that cross-competes with any one of the antibody or antigen-binding fragment thereof described herein.

[0208] In one aspect, the disclosure relates to a protein construct that binds to a complex comprising an AFP peptide and an MHC molecule, comprising: (1) a first functional moiety comprising an antigen-binding fragment thereof described herein; and (2) a second functional moiety comprising a T-cell engaging molecule.

[0209] In some embodiments, the T-cell engaging molecule is a scFv targeting human CD3ε.

[0210] In some embodiments, the AFP peptide comprises a sequence that is at least 80% identical to the amino acid sequence of SEQ ID NO: 3.

[0211] In some embodiments, the MHC molecule is HLA-A*02:01.

[0212] In some embodiments, the first functional moiety and the second functional moiety are connected via a linker.

[0213] In some embodiments, the linker comprises GGGGS (SEQ ID NO: 421).

[0214] In some embodiments, the protein construct comprises an amino acid sequence of SEQ ID NO:297-300.

[0215] In one aspect, the disclosure relates to a protein construct, comprising:
[0216] (1) a first functional moiety comprising an antibody or antigen-binding fragment thereof described herein; and
[0217] (2) a second functional moiety comprising a T-cell engaging molecule; and
[0218] (3) a third functional moiety comprising a single chain human crystallizable fragment.

[0219] In some embodiments, the T-cell engaging molecule is a scFv targeting human CD3R.

[0220] In some embodiments, the first functional moiety, the second functional moiety, and the third functional moiety are connected via one or more linkers.

[0221] In some embodiments, the AFP peptide comprises a sequence that is at least 80% identical to the amino acid sequence of SEQ ID NO: 3.

[0222] In some embodiments, the MHC molecule is HLA-A*02:01.

[0223] In some embodiments, the protein construct comprises an amino acid sequence that is at least 80%, 85%, 90%, 95%, or 100% identical to a sequence selected from SEQ ID NO: 302-331.

[0224] In one aspect, the disclosure relates to a protein construct that binds to a complex comprising an AFP peptide and an MHC molecule, comprising:
[0225] (1) a first heavy chain polypeptide comprising a VH;
[0226] (2) a light chain polypeptide comparing a VL, where the VH and the VL associate with each other and specially bind to CD3,
[0227] (3) a second heavy chain polypeptide, comprising a heavy chain single variable region (V_{H}H) of SEQ ID NO: 152 or 160.

[0228] In some embodiments, either one or both of the first heavy chain polypeptide and the second polypeptide comprise at least one mutation that reduces Fc mediated effector function.

[0229] In some embodiments, either one or both of the first heavy chain polypeptide and the second polypeptide having Ala at either one or both of positions 234 and 235 (EU numbering).

[0230] In some embodiments, either one or both of the first heavy chain polypeptide and the second heavy chain polypeptide have Ser at position 366, Ala at position 368, and Val at position 407 (EU numbering).

[0231] In some embodiments, the second heavy chain polypeptide comprises two or more V_{H}Hs.

[0232] In some embodiments, the first heavy chain polypeptide comprises an amino sequence that is at least 80% identical to SEQ ID NO: 332, the light chain polypeptide comprises an amino sequence that is at least 80% identical to SEQ ID NO: 333, and the second heavy chain polypeptide comprises an amino sequence that is at least 80% identical to SEQ ID NO:334 or SEQ ID NO: 335.

[0233] In one aspect, the disclosure relates to an antibody-drug conjugate comprising an antibody or antigen-binding fragment thereof described herein covalently bound to a therapeutic agent.

[0234] In one aspect, the disclosure relates to a pharmaceutical composition comprising an antibody or antigen-binding fragment thereof described herein, a protein construct described herein, or an antibody drug conjugate described herein, and a pharmaceutically acceptable carrier.

[0235] In one aspect, the disclosure relates to a nucleic acid comprising a polynucleotide encoding an antibody or antigen-binding fragment thereof described herein or a protein construct described herein.

[0236] In one aspect, the disclosure relates to a vector comprising a nucleic acid described herein.

[0237] In one aspect, the disclosure relates to a cell comprising a vector described herein.

[0238] In one aspect, the disclosure relates to a method of producing an antibody or an antigen-binding fragment thereof or a protein construct, the method comprising culturing a cell described herein under conditions sufficient for the cell to produce the antibody or the antigen-binding fragment thereof or the protein construct; and collecting the antibody or the antigen-binding fragment thereof or the protein construct produced by the cell.

[0239] In one aspect, the disclosure relates to an engineered receptor comprising an antigen-binding fragment thereof described herein.

[0240] In some embodiments, the engineered receptor further comprises a transmembrane region, and an intracellular signaling domain.

[0241] In some embodiments, the engineered receptor is a chimeric antigen receptor (“CAR”).

[0242] In some embodiments, the engineered receptor further comprises a hinge region.

[0243] In some embodiments, the transmembrane region comprises a transmembrane region of CD4, CD8, and/or CD28, or a portion thereof.

[0244] In some embodiments, the hinge region comprises an amino acid sequence set forth in SEQ ID NO: 424 or 426, or an amino acid sequence that is at least 90% identical to SEQ ID NO: 424 or 426.

[0245] In some embodiments, the intracellular signaling domain comprises a primary intracellular signaling sequence of an immune effector cell.

[0246] In some embodiments, the intracellular signaling domain is or comprises a functional signaling domain of CD3 zeta.

[0247] In some embodiments, the intracellular signaling domain is or comprises the amino acid sequence set forth in SEQ ID NO: 431 or an amino acid sequence that is at least 90% sequence identical to SEQ ID NO: 431.

[0248] In some embodiments, the intracellular signaling domain further comprises a costimulatory signaling domain.

[0249] In some embodiments, the costimulatory signaling domain comprises a functional signaling domain from a protein selected from the group consisting of a MHC class I molecule, a TNF receptor protein, an Immunoglobulin-like protein, a cytokine receptor, an integrin, a signaling lymphocytic activation molecule (SLAM protein), an activating NK cell receptor, BTLA, a Toll ligand receptor, OX40, CD2, CD7, CD27, CD28, CD30, CD40, CDS, ICAM-1, LFA-1, CD11a/CD18, 4-1BB (CD137), B7-H3, CDS, ICAM-1, ICOS (CD278), GITR, BAFFR, LIGHT, HVEM (LIGHTR), KIRDS2, SLAMF7, NKp80 (KLRF1), NKp44, NKp30, NKp46, CD19, CD4, CD8alpha, CD8beta, IL2R beta, IL2R gamma, IL7R alpha, ITGA4, VLA1, CD49a, ITGA4, IA4, CD49D, ITGA6, VLA-6, CD49f, ITGAD, CD11d, ITGAE, CD103, ITGAL, CD11a, LFA-1, ITGAM, CD11b, ITGAX, CD11c, ITGB1, CD29, ITGB2, CD18, LFA-1, ITGB7, NKG2D, NKG2C, TNFR2, TRANCE/RANKL, DNAM1 (CD226), SLAMF4 (CD244, 2B4), CD84, CD96 (Tactile), CEACAM1, CRTAM, Ly9 (CD229), CD160 (BY55), PSGL1, CD100 (SEMA4D), CD69, SLAMF6 (NTB-A, Ly108), SLAM (SLAMF1, CD150, IPO-3), BLAME (SLAMF8), SELPLG (CD162), LTBR, LAT, GADS, SLP-76, PAG/Cbp, CD19a, and a CD83 ligand.

[0250] In some embodiments, the costimulatory signaling domain comprises an intracellular signaling domain of 4-1BB and/or CD28.

[0251] In some embodiments, the costimulatory signaling domain is or comprises an amino acid sequence set forth in SEQ ID NO: 428, 429, or 430 or an amino acid sequence that is at least 90% identical to SEQ ID NO: 428, 429, or 430.

[0252] In some embodiments, the engineered receptor comprises a signal peptide.

[0253] In some embodiments, the signal peptide is at least 80%, 85%, 90%, 95% or 100% identical to SEQ ID NO: 412 or 414.

[0254] In some embodiments, the engineered receptor comprises a sequence that is at least 80%, 85%, 90%, 95% or 100% identical to 413 or 415.

[0255] In some embodiments, the engineered receptor is a chimeric T cell receptor (“cTCR”).

[0256] In some embodiments, the transmembrane domain is derived from the transmembrane domain of a TCR subunit selected from the group consisting of TCRα, TCRβ, TCRγ, TCRδ, CD3γ, CD3ε, and CD3δ.

[0257] In some embodiments, the transmembrane domain is derived from the transmembrane domain of CD3ε.

[0258] In some embodiments, the intracellular signaling domain is derived from the intracellular signaling domain of a TCR subunit selected from the group consisting of TCRα, TCRβ, TCRγ, TCRδ, CD3γ, CD3ε, and CD3δ.

[0259] In some embodiments, the intracellular signaling domain is derived from the intracellular signaling domain of CD3.

[0260] In some embodiments, the engineered receptor further comprises at least a portion of an extracellular domain of a TCR subunit.

[0261] In some embodiments, the antigen binding fragment is fused to the N-terminus of CD3ε (“eTCR”).

[0262] In some embodiments, the engineered receptor comprises a sequence that is at least 80%, 85%, 90%, 95% or 100% identical to 416, 417, 418, 419, or 420.

[0263] In one aspect, the disclosure relates to a polynucleotide encoding an engineered receptor described herein.

[0264] In one aspect, the disclosure relates to a vector comprising a polynucleotide described herein.

[0265] In some embodiments, the vector is a viral vector.

[0266] In one aspect, the disclosure relates to an engineered cell expressing an engineered receptor described herein.

[0267] In some embodiments, the engineered cell is an immune cell. In some embodiments, the immune cell is an NK cell or a T cell. In some embodiments, the engineered cell is a T cell. In some embodiments, the T cell is selected from the group consisting of cytotoxic T cell, a helper T cell, a natural killer T (NK-T) cell, and a γδT cell.

[0268] In one aspect, the disclosure relates to a method for producing an engineered cell, comprising introducing a vector described herein into a cell in vitro or ex vivo.

[0269] In some embodiments, the vector is a viral vector and the introducing is carried out by transduction.

[0270] In one aspect, the disclosure relates to a method of treating an AFP-associated disorder in a subject, comprising administering an effective amount of an antibody or antigen-binding fragment thereof described herein, a protein construct described herein, an antibody-drug conjugate described herein, a pharmaceutical composition described herein, or an engineered cell described herein to the subject.

[0271] In some embodiments, the AFP-associated disorder is a cancer. In some embodiments, the cancer is liver cancer, ovarian cancer, testicular cancer, stomach cancer, colon cancer, lung cancer, breast cancer, or lymphoma. In some embodiments, the cancer is hepatocellular carcinoma (HCC).

[0272] As used herein, the term “antibody” refers to any antigen-binding molecule that contains at least one (e.g., one, two, three, four, five, or six) complementary determining region (CDR) (e.g., any of the three CDRs from an immunoglobulin light chain or any of the three CDRs from an immunoglobulin heavy chain) and is capable of specifically binding to an epitope in an antigen. Non-limiting examples of antibodies include: monoclonal antibodies, polyclonal antibodies, multi-specific antibodies (e.g., bi-specific antibodies), single-chain antibodies, single variable domain (V_{H}H) antibodies, chimeric antibodies, human antibodies, and humanized antibodies. In some embodiments, an antibody can contain an Fc region of a human antibody.

[0273] The term antibody also includes derivatives, e.g., multi-specific antibodies, bi-specific antibodies, single-chain antibodies, diabodies, and linear antibodies formed from these antibodies or antibody fragments.

[0274] As used herein, the term “antigen-binding fragment” refers to a portion of a full-length antibody, wherein the portion of the antibody is capable of specifically binding to an antigen. In some embodiments, the antigen-binding fragment contains at least one variable domain (e.g., a variable domain of a heavy chain, a variable domain of light chain or a V_{H}H). Non-limiting examples of antibody fragments include, e.g., Fab, Fab′, F(ab′)2, and Fv fragments, scFv, and V_{H}H.

[0275] As used herein, the terms “subject” and “patient” are used interchangeably throughout the specification and describe an animal, human or non-human, to whom treatment according to the methods of the present disclosure is provided. Veterinary and non-veterinary applications are contemplated in the present disclosure. Human patients can be adult humans or juvenile humans (e.g., humans below the age of 18 years old). In addition to humans, patients include but are not limited to mice, rats, hamsters, guinea-pigs, rabbits, ferrets, cats, dogs, and primates. Included are, for example, non-human primates (e.g., monkey, chimpanzee, gorilla, and the like), rodents (e.g., rats, mice, gerbils, hamsters, ferrets, rabbits), lagomorphs, swine (e.g., pig, miniature pig), equine, canine, feline, bovine, and other domestic, farm, and zoo animals.

[0276] As used herein, when referring to an antibody or an antigen-binding fragment, the phrases “specifically binding” and “specifically binds” mean that the antibody or an antigen-binding fragment interacts with its target molecule preferably to other molecules, because the interaction is dependent upon the presence of a particular structure (i.e., the antigenic determinant or epitope) on the target molecule; in other words, the reagent is recognizing and binding to molecules that include a specific structure rather than to all molecules in general. An antibody that specifically binds to the target molecule may be referred to as a target-specific antibody. For example, an antibody that specifically binds to GPC3 may be referred to as a GPC3-specific antibody or an anti-GPC3 antibody.

[0277] As used herein, the term “bispecific antibody” refers to an antibody that binds to two different epitopes. The epitopes can be on the same antigen or on different antigens.

[0278] As used herein, the term “trispecific antibody” refers to an antibody that binds to three different epitopes. The epitopes can be on the same antigen or on different antigens.

[0279] As used herein, the term “multispecific antibody” refers to an antibody that binds to two or more different epitopes. The epitopes can be on the same antigen or on different antigens. A multispecific antibody can be e.g., a bispecific antibody or a trispecific antibody. In some embodiments, the multispecific antibody binds to two, three, four, five, or six different epitopes.

[0280] As used herein, a “V_{H}H” refers to the variable domain of a heavy chain only antibody. In some embodiments, the V_{H}H is a humanized V_{H}H.

[0281] As used herein, a “chimeric antigen receptor” or “CAR” refers to a fusion protein comprising an extracellular domain capable of binding to an antigen, and an intracellular region comprising one or more intracellular signaling domains derived from signal transducing proteins. The extracellular domain can be any proteinaceous molecule or part thereof that can specifically bind to a predetermined antigen. In some embodiments, the extracellular domain comprises an antibody or antigen binding fragment thereof. In some embodiments, the intracellular signaling domain can be any oligopeptide or polypeptide domain known to function to transmit a signal causing activation or inhibition of a biological process in a cell, for example, activation of an immune cell such as a T cell or a NK cell.

[0282] As used herein, a “tandem CAR” refers to a CAR comprising two or more extracellular domain capable of binding to an antigen. In some embodiments, a tandem CAR can have 2, 3, 4, 5, 6, 7, 8, 9, or 10 extracellular domains that are capable of binding to an antigen. These antigen-binding domains can be the same or different. In some embodiments, they can bind to the same or different antigens. In some embodiments, they can bind to different epitopes on the same antigen.

[0283] As used herein, when referring to an antibody, the phrases “specifically binding” and “specifically binds” mean that the antibody interacts with its target antigen preferably to other molecules, because the interaction is dependent upon the presence of a particular structure (i.e., the antigenic determinant or epitope) on the target molecule; in other words, the reagent is recognizing and binding to molecules that include a specific structure rather than to all molecules in general. An antibody that specifically binds to the target molecule may be referred to as a target-specific antibody. For example, an antibody that specifically binds to a complex comprising AFP and a MHC molecule may be referred to as an AFP/MHC-specific antibody, an anti-AFP/MHC antibody, or an anti-AFP/MHC complex antibody.

[0284] As used herein, the term “cancer” refers to cells having the capacity for autonomous growth. Examples of such cells include cells having an abnormal state or condition characterized by rapidly proliferating cell growth. The term is meant to include cancerous growths, e.g., tumors; oncogenic processes, metastatic tissues, and malignantly transformed cells, tissues, or organs, irrespective of histopathologic type or stage of invasiveness. Also included are malignancies of the various organ systems, such as respiratory, cardiovascular, renal, reproductive, hematological, neurological, hepatic, gastrointestinal, and endocrine systems; as well as adenocarcinomas which include malignancies such as most colon cancers, renal-cell carcinoma, prostate cancer and/or testicular tumors, non-small cell carcinoma of the lung, and cancer of the small intestine. Cancer that is “naturally arising” includes any cancer that is not experimentally induced by implantation of cancer cells into a subject, and includes, for example, spontaneously arising cancer, cancer caused by exposure of a patient to a carcinogen(s), cancer resulting from insertion of a transgenic oncogene or knockout of a tumor suppressor gene, and cancer caused by infections, e.g., viral infections. The term “carcinoma” is art recognized and refers to malignancies of epithelial or endocrine tissues. The term also includes carcinosarcomas, which include malignant tumors composed of carcinomatous and sarcomatous tissues. An “adenocarcinoma” refers to a carcinoma derived from glandular tissue or in which the tumor cells form recognizable glandular structures. The term “sarcoma” is art recognized and refers to malignant tumors of mesenchymal derivation. The term “hematopoietic neoplastic disorders” includes diseases involving hyperplastic/neoplastic cells of hematopoietic origin. A hematopoietic neoplastic disorder can arise from myeloid, lymphoid or erythroid lineages, or precursor cells thereof. A hematologic cancer is a cancer that begins in blood-forming tissue, such as the bone marrow, or in the cells of the immune system. Examples of hematologic cancer include e.g., leukemia, lymphoma, and multiple myeloma etc.

[0285] Unless otherwise defined, all technical and scientific terms used herein have the same meaning as commonly understood by one of ordinary skill in the art to which this disclosure belongs. Methods and materials are described herein for use in the present disclosure; other, suitable methods and materials known in the art can also be used. The materials, methods, and examples are illustrative only and not intended to be limiting. All publications, patent applications, patents, sequences, database entries, and other references mentioned herein are incorporated by reference in their entirety. In case of conflict, the present specification, including definitions, will control.

[0286] Other features and advantages of the disclosure will be apparent from the following detailed description and figures, and from the claims.

### BRIEF DESCRIPTION OF THE DRAWINGS

[0287] FIG. 1 is an image showing reducing and non-reducing SDS-PAGE of AFP158/HLA-A*02:01 complex isolated after size exclusion chromatography (SEC). Major bands correspond to HLA-A*02:01 (˜35 kDa) and β2M (˜14 kDa). 2 μg protein was loaded. AFP158 pro is AFP158/HLA-A*02:01 complex; N is sample in Non-reducing buffer and R, in Reducing buffer.

[0288] FIG. 2 is a graph showing the SEC chromatogram of purified AFP158/HLA-A*02:01 complex.

[0289] FIG. 3 is a graph showing the immune response of immunized camel against AFP158/HLA-A*02:01 complex. Conventional IgG (IgG1) and heavy chain antibodies (HCAbs, IgG2 and IgG3) were fractionated from pre-immune and immunized sera. Antibody titers were determined by enzyme-linked immune sorbent assay (ELISA)-based experiment with immobilized biotinylated AFP158/HLA-A*02:01 complex.

[0290] FIGS. 4A-4B are graphs showing the binding EC₅₀ of purified antibodies to AFP158 loaded T2 cells. Binding EC₅₀ of five scFv-mIgG2aFc clones (AS170036, AS179723, AS179732, AS190259 and AS148691) and a positive control antibody ET1402L1 (FIG. 4A). Binding EC₅₀ of two sdAb-mIgG2aFc clones (AS167821 and AS167830) (FIG. 4B). The binding of different concentration of i647 labeled antibodies (three-fold dilution with a starting concentration of 300 nM) to AFP158 loaded live T2 cells was determined by flow cytometry.

[0291] FIGS. 5A-5B are graphs showing antibodies binding to AFP158, AFP158 homologous peptides and human endogenous self-peptides loaded T2 cells. Binding specificity of five scFv-mIgG2aFc clones (AS170036, AS179723, AS179732, AS190259 and AS148691) and a positive control antibody ET1402L1 (FIG. 5A). Binding specificity of two sdAb-mIgG2aFc clones (AS167821 and AS167830) (FIG. 5B). HLA01-10 is a peptide pool composed of peptide SEQ ID NOs: 16-25. HLA11-20 is a peptide pool composed of peptide SEQ ID NOs: 26-35. HLA21-30 is a peptide pool composed of peptide SEQ ID NOs: 36-45. HLA31-40 is a peptide pool composed of peptide SEQ ID NOs: 46-55. HLA41-50 is a peptide pool composed of peptide SEQ ID NOs: 56-65. Mean fluorescence intensity (MFI) above 500 was arbitrarily defined as reactive to peptide loaded T2 cells.

[0292] FIG. 6 shows the epitope mapping of antibodies by Alanine scanning. The binding between 30 or 50 nM i647 labeled antibodies and peptide-loaded T2 cells was assessed by flow cytometry. The MFI was normalized to WT (wild type) AFP158 peptide loaded T2 cell binding MFI. Positions on which alanine mutation caused >80% MFI reduction were arbitrarily defined as critical epitope positions.

[0293] FIG. 7 is a graph showing the binding EC₅₀ of purified humanized antibodies to AFP158 loaded T2 cells. The binding of different concentration of i647 labeled antibodies (three-fold dilution with a starting concentration of 300 nM) to AFP158 loaded live T2 cells was determined by flow cytometry.

[0294] FIG. 8 is a graph showing humanized antibodies binding to AFP158, AFP158 homologous peptides and human endogenous self-peptides loaded T2 cells. HLA01-10 is a peptide pool composed of peptide SEQ ID NOs: 16-25. HLA11-20 is a peptide pool composed of peptide SEQ ID NOs: 26-35. HLA21-30 is a peptide pool composed of peptide SEQ ID NOs: 36-45. HLA31-40 is a peptide pool composed of peptide SEQ ID NOs: 46-55. HLA41-50 is a peptide pool composed of peptide SEQ ID NOs: 56-65. Mean fluorescence intensity (MFI) above 500 was arbitrarily defined as reactive to peptide loaded T2 cells.

[0295] FIG. 9 shows the epitope mapping of humanized antibodies by Alanine scanning. The binding between 30 or 50 nM i647 labeled antibodies and peptide-loaded T2 cells was assessed by flow cytometry. The MFI was normalized to WT (wild type) AFP158 peptide loaded T2 cell binding MFI. Positions on which alanine mutation caused >80% MFI reduction were arbitrarily defined as critical epitope positions.

[0296] FIGS. 10A-10F are graphs showing the cytotoxicity of BiTE bispecific antibodies, including e.g., AS170036-TCE (FIG. 10A), AS170036 VL1VH1-TCE (FIG. 10B), AS179723-TCE (FIG. 10C), AS179732-TCE (FIG. 10D), Blinatumomab-TCE (FIG. 10E) and ET1402L1-TCE (FIG. 10F) for tumor cell lines. HepG2 (HLA-A*02:01+, AFP+) is the target cell line. SKHEP-1, MCF-7 and HEK293 (HLA-A*02:01+, AFP−) are AFP negative control cell lines. Blinatumomab-TCE is negative control antibody, and ET1402L1-TCE is positive control antibody.

[0297] FIGS. 11A-11E are graphs showing the cytotoxicity of BiTE bispecific antibodies, including e.g., AS170036-TCE (FIG. 11A), AS170036 VL1VH1-TCE (FIG. 11B), AS179723-TCE (FIG. 11C), AS179732-TCE (FIG. 11D) and ET1402L1-TCE (FIG. 11E) for peptide loaded T2 cells. HLA1-10 is a peptide pool composed of peptide SEQ ID NOs: 16-25. HLA11-20 is a peptide pool composed of peptide SEQ ID NOs: 26-35. HLA21-30 is a peptide pool composed of peptide SEQ ID NOs: 36-45. HLA31-40 is a peptide pool composed of peptide SEQ ID NOs: 46-55. HLA41-50 is a peptide pool composed of peptide SEQ ID NOs: 56-65.

[0298] FIGS. 12A-12E are graphs showing the cytotoxicity of BiTE-HLE bispecific antibodies using humanized clones, including e.g., AS170036 VL1VH1-TCE-HLE (FIG. 12A), AS179723 VL1g1VH1g1-N73Y-TCE-HLE (FIG. 12B), AS179732 VL1g1VH1g1-N73Y-TCE-HLE (FIG. 12C), AS190259 VL1VH1-TCE-HLE (FIG. 12D) and AS148691-TCE-HLE (FIG. 12E) for tumor cell lines. HepG2 (HLA-A*02:01+, AFP+) is the target cell line. SKHEP-1, MCF-7 and HEK293 (HLA-A*02:01+, AFP−) are AFP negative control cell lines. MJ (HLA-A*02:01−, AFP−) is HLA-A*02:01 and AFP double negative control cell line.

[0299] FIGS. 13A-13F are graphs showing the cytotoxicity of BiTE-HLE bispecific antibodies using humanized clones, including e.g., AS170036 VL1VH1-TCE-HLE (FIG. 13A), AS179723 VL1g1VH1g1-N73Y-TCE-HLE (FIG. 13B), AS179732 VL1g1VH1g1-N73Y-TCE-HLE (FIG. 13C), AS190259 VL1VH1-TCE-HLE (FIG. 13D), AS148691-TCE-HLE (FIG. 13E) and ET1402L1-TCE-HLE (FIG. 13F) for peptide loaded T2 cells. HLA1-10 is a peptide pool composed of peptide SEQ ID NOs: 16-25. HLA11-20 is a peptide pool composed of peptide SEQ ID NOs: 26-35. HLA21-30 is a peptide pool composed of peptide SEQ ID NOs: 36-45. HLA31-40 is a peptide pool composed of peptide SEQ ID NOs: 46-55. HLA41-50 is a peptide pool composed of peptide SEQ ID NOs: 56-65.

[0300] FIGS. 14A-14L are graphs showing the cytotoxicity of BiTE-HLE bispecific antibodies using affinity matured AS170036 VL1VH1 clones, including e.g., AS170036 VL1VH1-VHG56Y-TCE-HLE (FIG. 14A), AS170036 VL1VH1-VHS57K-TCE-HLE (FIG. 14B), AS170036 VL1VH1-VHS57H-TCE-HLE (FIG. 14C), AS170036 VL1VH1-VHG108A-TCE-HLE (FIG. 14D), AS170036 VL1VH1-VHG108D-TCE-HLE (FIG. 14E), AS170036 VL1VH1-56N98I-TCE-HLE (FIG. 14F), AS170036 VL1VH1-57M98Q-TCE-HLE (FIG. 14G), AS170036 VL1VH1-56N108A-TCE-HLE (FIG. 14H), AS170036 VL1VH1-57K108S-TCE-HLE (FIG. 14I), AS170036 VL1VH1-981108A-TCE-HLE (FIG. 14J), AS170036 VL1VH1-56Y98I108S-TCE-HLE (FIG. 14K) and AS170036 VL1VH1-56Y98Q108S-TCE-HLE (FIG. 14L) for tumor cell lines. HepG2 (HLA-A*02:01+, AFP+) is the target cell line. SKHEP-1, MCF-7 and HEK293 (HLA-A*02:01+, AFP−) are AFP negative control cell lines. MJ (HLA-A*02:01−, AFP−) is HLA-A*02:01 and AFP double negative control cell line.

[0301] FIGS. 15A-15L are graphs showing the cytotoxicity of BiTE-HLE bispecific antibodies using affinity matured AS170036 VL1VH1 clones, including e.g., AS170036 VL1VH1-VHG56Y-TCE-HLE (FIG. 15A), AS170036 VL1VH1-VHS57K-TCE-HLE (FIG. 15B), AS170036 VL1VH1-VHS57H-TCE-HLE (FIG. 15C), AS170036 VL1VH1-VHG108A-TCE-HLE (FIG. 15D), AS170036 VL1VH1-VHG108D-TCE-HLE (FIG. 15E), AS170036 VL1VH1-56N98I-TCE-HLE (FIG. 15F), AS170036 VL1VH1-57M98Q-TCE-HLE (FIG. 15G), AS170036 VL1VH1-56N108A-TCE-HLE (FIG. 15H), AS170036 VL1VH1-57K108S-TCE-HLE (FIG. 15I), AS170036 VL1VH1-981108A-TCE-HLE (FIG. 15J), AS170036 VL1VH1-56Y98I108S-TCE-HLE (FIG. 15K) and AS170036 VL1VH1-56Y98Q108S-TCE-HLE (FIG. 15L) for peptide loaded T2 cells. HLA1-10 is a peptide pool composed of peptide SEQ ID NOs: 16-25. HLA11-20 is a peptide pool composed of peptide SEQ ID NOs: 26-35. HLA21-30 is a peptide pool composed of peptide SEQ ID NOs: 36-45. HLA31-40 is a peptide pool composed of peptide SEQ ID NOs: 46-55. HLA41-50 is a peptide pool composed of peptide SEQ ID NOs: 56-65.

[0302] FIGS. 16A-16B are graphs showing the cytotoxicity of TCE-KIH bispecific antibodies using sdAb clones, including e.g., AS167821A-AS167821A-TCE-KIH (FIG. 16A) and AS167830A-AS167830A-TCE-KIH (FIG. 16B) for tumor cell lines. HepG2 (HLA-A*02:01+, AFP+) is the target cell line. SKHEP-1, MCF-7 and HEK293 (HLA-A*02:01+, AFP−) are AFP negative control cell lines. MJ (HLA-A*02:01−, AFP−) is HLA-A*02:01 and AFP double negative control cell line.

[0303] FIGS. 17A-17B are graphs showing the cytotoxicity of TCE-KIH bispecific antibodies using sdAb clones, including e.g., AS167821A-AS167821A-TCE-KIH (FIG. 17A) and AS167830A-AS167830A-TCE-KIH (FIG. 17B) for peptide loaded T2 cells. HLA1-10 is a peptide pool composed of peptide SEQ ID NOs: 16-25. HLA11-20 is a peptide pool composed of peptide SEQ ID NOs: 26-35. HLA21-30 is a peptide pool composed of peptide SEQ ID NOs: 36-45. HLA31-40 is a peptide pool composed of peptide SEQ ID NOs: 46-55. HLA41-50 is a peptide pool composed of peptide SEQ ID NOs: 56-65.

[0304] FIG. 18A is a group of graphs showing the expression of AFP-CAR on transduced primary T cells.

[0305] FIG. 18B is a group of graphs showing the cell cytotoxicity assay of T cells on HepG2, HEK293, SK-HEP-1 and THP-1 cells.

[0306] FIG. 19A is a group of graphs showing the expression of AFP-CAR on transduced primary T cells.

[0307] FIG. 19B is a group of graphs showing the cell cytotoxicity assay of T cells on HepG2, HEK293, U87-MG, THP-1, MCF-7, and SK-BR-3 cells.

[0308] FIG. 19C is a group of graphs showing the cell cytotoxicity assay of T cells on AFP158 (pAFP) and similar peptide-pulsed T2 cells.

[0309] FIG. 19D is a group of graphs showing the cell cytotoxicity assay of T cells on AFP158 (pAFP) and similar peptide-pulsed T2 cells.

[0310] FIG. 20A is a group of graphs showing the expression of AS170036-CAR-T at different formats on transduced primary T cells.

[0311] FIG. 20B is a group of graphs showing the short term (left) and long term (right) killing efficacy of AS170036-CAR-T at different formats.

[0312] FIG. 21 is a graph showing the cell cytotoxicity assay of AFP CAR-T cells on HepG2 cells.

[0313] FIGS. 22A-22D are graphs showing the cell cytotoxicity assay of AFP CAR-T cells on HepG2 and MCF-7 cells.

[0314] FIG. 23 shows SPR binding level of AS170036 VL1VH1 muteins to complexes of AFP158 or AFP158 homologous peptides and HLA-A*02:01.

[0315] FIG. 24 shows HLA-A*02 alleles frequencies organized by geographical region.

[0316] FIG. 25 shows monovalent binding affinity of AFP158/HLA-A*02:01-specific antibodies to multiple AFP158/HLA-A*02 complexes with different subtypes.

[0317] FIG. 26 shows monovalent binding affinity of AS170036 VL1VH1 affinity maturation antibodies to multiple AFP158/HLA-A*02 complexes with different subtypes.

[0318] FIG. 27 shows mRNA levels of gene products measured by RT-PCR (Quantity Mean/μl cDNA).

[0319] FIGS. 28A-28B shows VH, VL, and CDR sequences for several scFv.

[0320] FIG. 29 shows CDR sequences for several V_{H}Hs.

[0321] FIGS. 30A-30C shows humanized sequences for AS170036, AS179723, and AS190259.

[0322] FIG. 31 lists sequences in the present disclosure.

### DETAILED DESCRIPTION

[0323] The present disclosure provides various immunotherapies for cancers, particularly hepatocellular carcinoma (HCC). Several features make HCC a promising candidate for immunotherapy. First, in contrast to many cancers, HCCs do not generally down-regulate HLA-class I expression, which are essential for presenting intracellular antigens on the cell surface so that they can be recognized by CD8⁺ T cells (Shen et al., (2009), Molecular immunology 46, 2045-2053). Second, a recent meta-analysis confirmed that high levels of HCC tumor infiltration by CD8⁺ T cells improved clinical outcomes, including overall survival (Yao et al., (2017), Scientific reports 7, 7525). In addition, isolated class I restricted tumor-killing T-cell clones were generated spontaneously in HCC patients. Most of these clones recognized alpha-fetoprotein (Flecken et al., (2014), Hepatology 59, 1415-1426).

[0324] This disclosure provides antibodies, antigen-binding fragments, protein constructs, and chimeric antigen receptors that bind to a complex comprising an AFP peptide and an MHC molecule. These antibodies, antigen-binding fragments, protein constructs, and chimeric antigen receptors can be used to treat AFP associated disorders, e.g., cancer.

### Alpha-Fetoprotein

[0325] Alpha-fetoprotein (AFP) is absent from normal adult tissues, except for trace amounts produced by the liver. However, expression of the AFP gene is reactivated in adults during liver regeneration, hepatocarcinogenesis, germ cell tumor or in some cases of viral infection (HBV/HCV) (Mizejewski, G. J. (2016), Journal of hepatocellular carcinoma 3, 37-40). Serum AFP levels are also used as a biomarker of the disease, because they correlate inversely with the survival of patients with HCC (Yamashita et al. (2008), Cancer research 68, 1451-1461).

[0326] As AFP is expressed intracellularly and secreted, it has been considered unsuitable for drug development with conventional antibody-based therapies. However, it is possible that AFP in nucleated human cells are processed into peptides and presented by class I MHCs on the surface of cells. The present disclosure provides “TCR-like” antibodies targeting AFP peptide-MHC complexes. The development of these TCR-like antibodies based therapeutics can improve the therapeutic efficacy. Thus, in one aspect, the present disclosure provides methods of treating disorders associated with AFP. In some embodiments, the disorder is a disorder that over expresses AFP. In some embodiments, the disorder is cancer, e.g., liver cancer such as hepatocellular carcinoma (HCC). In some embodiments, the subject has HBV infection or HCV infection. In some embodiments, the subject is associated with heavy alcohol intake, obesity, smoking, and/or type 2 diabetes. In some embodiments, the methods as described herein can reduce the risk of developing cancer in these subjects.

[0327] Among these peptides presented by cells, FMNKFIYEI (AFP158; SEQ ID NO: 3) is an immunodominant T-cell epitope restricted by HLA-A*02:01. In some embodiments, the antibodies or antigen binding fragments as described herein specifically bind to AFP158/HLA-A*02:01.

### Antibodies and Antigen Binding Fragments

[0328] The present disclosure provides antibodies and antigen-binding fragments thereof that bind to a complex comprising an AFP peptide (e.g., AFP158) and an MHC molecule. In general, antibodies (also called immunoglobulins) are made up of two classes of polypeptide chains, light chains and heavy chains. A non-limiting antibody of the present disclosure can be an intact, four immunoglobulin chain antibody comprising two heavy chains and two light chains. The heavy chain of the antibody can be of any isotype including IgM, IgG, IgE, IgA, or IgD or sub-isotype including IgG1, IgG2, IgG2a, IgG2b, IgG3, IgG4, IgE1, IgE2, etc. The light chain can be a kappa light chain or a lambda light chain. An antibody can have two identical copies of a light chain and two identical copies of a heavy chain. The heavy chains, which each contain one variable domain (or variable region, VH) and multiple constant domains (or constant regions), bind to one another via disulfide bonding within their constant domains to form the “stem” of the antibody. The light chains, which each contain one variable domain (or variable region, V_{L}) and one constant domain (or constant region), each bind to one heavy chain via disulfide binding. The variable region of each light chain is aligned with the variable region of the heavy chain to which it is bound. The variable regions of both the light chains and heavy chains contain three hypervariable regions sandwiched between more conserved framework regions (FR).

[0329] These hypervariable regions, known as the complementary determining regions (CDRs), form loops that comprise the principle antigen binding surface of the antibody. The four framework regions largely adopt a beta-sheet conformation and the CDRs form loops connecting, and in some cases forming part of, the beta-sheet structure. The CDRs in each chain are held in close proximity by the framework regions and, with the CDRs from the other chain, contribute to the formation of the antigen-binding region.

[0330] Methods for identifying the CDR regions of an antibody by analyzing the amino acid sequence of the antibody are well known, and a number of definitions of the CDRs are commonly used. The Kabat definition is based on sequence variability, and the Chothia or AbM definition is based on the location of the structural loop regions. These methods and definitions are described in, e.g., Martin, Antibody engineering, Springer Berlin Heidelberg, 2001. 422-439; Abhinandan, et al., Molecular immunology 45.14 (2008): 3832-3839; Wu, T. T. and Kabat, E. A. (1970) J. Exp. Med. 132: 211-250; Martin et al., Methods Enzymol. 203:121-53 (1991); Morea et al., Biophys Chem. 68(1-3):9-16 (October 1997); Morea et al., J Mol Biol. 275(2):269-94 (January 1998); Chothia et al., Nature 342(6252):877-83 (December 1989); Ponomarenko and Bourne, BMC Structural Biology 7:64 (2007); each of which is incorporated herein by reference in its entirety. In some embodiments, the Kabat definition is used. In some embodiments, the Chothia definition is used. In some embodiments, the AbM definition is used. In some embodiments, a combination of Kabat and Chothia, and/or some other definitions that are well known in the art are used.

[0331] The CDRs are important for recognizing an epitope of an antigen. As used herein, an “epitope” is the smallest portion of a target molecule capable of being specifically bound by the antigen binding domain of an antibody. The minimal size of an epitope may be about three, four, five, six, or seven amino acids, but these amino acids need not be in a consecutive linear sequence of the antigen's primary structure, as the epitope may depend on an antigen's three-dimensional configuration based on the antigen's secondary and tertiary structure.

[0332] In some embodiments, the antibody is an intact immunoglobulin molecule (e.g., IgG1, IgG2a, IgG2b, IgG3, IgM, IgD, IgE, IgA). The IgG subclasses (IgG1, IgG2, IgG3, and IgG4) are highly conserved, differ in their constant region, particularly in their hinges and upper CH2 domains. The sequences and differences of the IgG subclasses are known in the art, and are described, e.g., in Vidarsson, et al, Frontiers in immunology 5 (2014); Irani, et al., Molecular immunology 67.2 (2015): 171-182; Shakib, Farouk, ed. The human IgG subclasses: molecular analysis of structure, function and regulation. Elsevier, 2016; each of which is incorporated herein by reference in its entirety.

[0333] The antibody can also be an immunoglobulin molecule that is derived from any species (e.g., human, rodent, mouse, camelid). Antibodies disclosed herein also include, but are not limited to, polyclonal, monoclonal, monospecific, polyspecific antibodies, and chimeric antibodies that include an immunoglobulin binding domain fused to another polypeptide. The term “antigen binding domain” or “antigen binding fragment” is a portion of an antibody that retains specific binding activity of the intact antibody, i.e., any portion of an antibody that is capable of specific binding to an epitope on the intact antibody's target molecule. It includes, e.g., Fab, Fab′, F(ab′)₂, and variants of these fragments. Thus, in some embodiments, an antibody or an antigen binding fragment thereof can be, e.g., a scFv, a Fv, a Fd, a dAb, a bispecific antibody, a bispecific scFv, a diabody, a linear antibody, a single-chain antibody molecule, a multi-specific antibody formed from antibody fragments, and any polypeptide that includes a binding domain which is, or is homologous to, an antibody binding domain. Non-limiting examples of antigen binding domains include, e.g., the heavy chain and/or light chain CDRs of an intact antibody, the heavy and/or light chain variable regions of an intact antibody, full length heavy or light chains of an intact antibody, or an individual CDR from either the heavy chain or the light chain of an intact antibody.

[0334] In some embodiments, the antigen binding fragment can form a part of a chimeric antigen receptor (CAR). In some embodiments, the chimeric antigen receptor are fusions of single-chain variable fragments (scFv) as described herein, fused to CD3-zeta transmembrane- and endodomain. In some embodiments, the chimeric antigen receptor also comprises intracellular signaling domains from various costimulatory protein receptors (e.g., CD28, 4-1BB, ICOS). In some embodiments, the chimeric antigen receptor comprises multiple signaling domains, e.g., CD3z-CD28-4-1BB or CD3z-CD28-OX40, to increase potency. Thus, in one aspect, the disclosure further provides cells (e.g., T cells) that express the chimeric antigen receptors as described herein. In some embodiments, the scFv has one heavy chain variable domain, and one light chain variable domain.

[0335] The disclosure provides antibodies and antigen-binding fragments thereof that specifically bind to a complex comprising an AFP peptide and an MHC molecule. In some embodiments, the complex comprises an AFP158 peptide and an HLA-A molecule (e.g., HLA-A/AFP158 complex). In some embodiments, the complex is a complex comprising an AFP158 peptide and an HLA-A*02 molecule (HLA-A*02/AFP158, or AFP158/HLA-A*02). In some embodiments, the complex is AFP158/HLA-A*02:01. The antibodies and antigen-binding fragments described herein are capable of binding to a complex comprising an AFP peptide and an MHC molecule.

[0336] The disclosure provides e.g., antibodies and antigen-binding fragments thereof, the chimeric antibodies thereof, and the humanized antibodies thereof (e.g., antibodies as shown in FIGS. 28A, 28B, 30A, 30B, and 30C). The disclosure further provides, e.g., humanized, affinity-matured antibodies, and chimeric antibodies thereof. In some embodiments, the present disclosure provides antibodies and antigen-binding fragments thereof derived from AS170036, AS179723, AS179732, AS190259, AS148691, AS170036 VL1VH1, AS179723 VL1g1VH1g1-N73Y, AS179732 VL1g1VH1g1-N73Y, AS190259 VL1VH1, AS176934, AS176951, AS176992, AS177005, and AS170030.

[0337] The CDR sequences for AS170036, and AS170036 derived antibodies (e.g., humanized antibodies AS170036 VL1VH1, AS170036 VL2VH1, AS170036 VL1VH2, and AS170036 VL2VH2) include CDRs of the heavy chain variable domain, SEQ ID NOs: 78, 80, and 82, and CDRs of the light chain variable domain, SEQ ID NOs: 86, 88, and 90.

[0338] The CDR sequences for AS179723, and AS179723 derived antibodies (e.g., AS179723 VL1VH1) include CDRs of the heavy chain variable domain, SEQ ID NOs: 95, 97, and 99, and CDRs of the light chain variable domain, SEQ ID NOs: 103, 105, and 107. In some embodiments, the VH and the VL can be humanized. In some embodiments, the humanized VH include CDRs as set forth in SEQ ID NO: 95, 97, and 99. In some embodiments, the humanized VH include CDRs as set forth in SEQ ID NO: 95, 336, 99. In some embodiments, the humanized VH include CDRs as set forth in SEQ ID NO: 95, 337, 99. In some embodiments, the humanized VL include CDRs as set forth in SEQ ID NO: 103, 105, 107. In some embodiments, the humanized VL include CDRs as set forth in SEQ ID NO: 338, 105, 107. These humanized VH and VL can be paired with each other. In some embodiments, the CDR sequences for humanized antibody (e.g., AS179723 VL1VH1g1 or AS179723 VL1 VH1g1-N73Y) include CDRs of the heavy chain variable domain, SEQ ID NOs: 95, 336, and 99, and CDRs of the light chain variable domain, SEQ ID NOs: 103, 105, and 107. In some embodiments, the CDR sequences for humanized antibody (e.g., AS179723 VL1g1VH1) include CDRs of the heavy chain variable domain, SEQ ID NOs: 95, 97, and 99, and CDRs of the light chain variable domain, SEQ ID NOs: 338, 105, and 107. The CDR sequences for humanized antibody AS179723 VL1g1VH1g1 include CDRs of the heavy chain variable domain, SEQ ID NOs: 95, 336, and 99, and CDRs of the light chain variable domain, SEQ ID NOs: 338, 105, and 107. The CDR sequences for humanized antibody AS179723 VL1g1VH1g1-N73Y include CDRs of the heavy chain variable domain, SEQ ID NOs: 95, 337, and 99, and CDRs of the light chain variable domain, SEQ ID NOs: 338, 105, and 107.

[0339] The CDR sequences for AS179732, and AS179732 derived antibodies (e.g., AS179732 VL1VH1) include CDRs of the heavy chain variable domain, SEQ ID NOs: 95, 97, and 99, and CDRs of the light chain variable domain, SEQ ID NOs: 112, 114, and 116. In some embodiments, the humanized VH include CDRs as set forth in SEQ ID NO: 95, 97, and 99. In some embodiments, the humanized VH include CDRs as set forth in SEQ ID NO: 95, 336, 99. In some embodiments, the humanized VH include CDRs as set forth in SEQ ID NO: 95, 337, 99. In some embodiments, the humanized VL include CDRs as set forth in SEQ ID NO: 112, 114, 116. In some embodiments, the humanized VL include CDRs as set forth in SEQ ID NO: 339, 114, 116. Each of these humanized VH can be paired with each of the humanized VL. The CDR sequences for humanized antibody AS179732 VL1VH1g1 include CDRs of the heavy chain variable domain, SEQ ID NOs: 95, 336, and 99, and CDRs of the light chain variable domain, SEQ ID NOs: 112, 114, and 116. The CDR sequences for humanized antibody AS179732 VL1g1VH1 include CDRs of the heavy chain variable domain, SEQ ID NOs: 95, 97, and 99, and CDRs of the light chain variable domain, SEQ ID NOs: 339, 114, and 116. The CDR sequences for humanized antibody AS179732 VL1g1VH1g1 include CDRs of the heavy chain variable domain, SEQ ID NOs: 95, 336, and 99, and CDRs of the light chain variable domain, SEQ ID NOs: 339, 114, and 116. The CDR sequences for humanized antibody AS179732 VL1g1VH1g1-N73Y include CDRs of the heavy chain variable domain, SEQ ID NOs: 95, 337, and 99, and CDRs of the light chain variable domain, SEQ ID NOs: 339, 114, and 116. The CDR sequences for humanized antibody AS179732 VL1 VH1g1 or AS179732 VL1 VH1g1-N73Y include CDRs of the heavy chain variable domain, SEQ ID NOs: 95, 337, and 99, and CDRs of the light chain variable domain, SEQ ID NOs: 112, 114, and 116.

[0340] The CDR sequences for AS190259, and AS190259 derived antibodies (e.g., AS190259 VL1VH1 and AS190259 VL2VH1) include CDRs of the heavy chain variable domain, SEQ ID NOs: 121, 123, and 125, and CDRs of the light chain variable domain, SEQ ID NOs: 129, 131, and 133. In some embodiments, the humanized VH include CDRs as set forth in SEQ ID NO: 121, 340, and 125. For example, the CDR sequences for humanized antibodies AS190259 VL1VH1g1 and AS190259 VL2VH1g1 include CDRs of the heavy chain variable domain, SEQ ID NOs: 121, 340, and 125, and CDRs of the light chain variable domain, SEQ ID NOs: 129, 131, and 133.

[0341] The CDR sequences for AS148691 and AS148691 derived antibodies include CDRs of the heavy chain variable domain, SEQ ID NOs: 138, 140, and 142, and CDRs of the light chain variable domain, SEQ ID NOs: 146, 148, and 150.

[0342] The CDR sequences for AS176934 and AS176934 derived antibodies (e.g., humanized antibodies) include CDRs of the heavy chain variable domain, SEQ ID NOs: 370, 371, and 372, and CDRs of the light chain variable domain, SEQ ID NOs: 373, 374, and 375.

[0343] The CDR sequences for AS176951 and AS176951 derived antibodies (e.g., humanized antibodies) include CDRs of the heavy chain variable domain, SEQ ID NOs: 379, 380, and 381, and CDRs of the light chain variable domain, SEQ ID NOs: 382, 383, and 384.

[0344] The CDR sequences for AS176992 and AS176992 derived antibodies (e.g., humanized antibodies) include CDRs of the heavy chain variable domain, SEQ ID NOs: 388, 389, and 390, and CDRs of the light chain variable domain, SEQ ID NOs: 391, 392, and 393.

[0345] The CDR sequences for AS177005 and AS177005 derived antibodies (e.g., humanized antibodies) include CDRs of the heavy chain variable domain, SEQ ID NOs: 397, 398, and 399, and CDRs of the light chain variable domain, SEQ ID NOs: 400, 401, and 402.

[0346] The CDR sequences for AS170030 and AS170030 derived antibodies (e.g., humanized antibodies) include CDRs of the heavy chain variable domain, SEQ ID NOs: 406, 407, and 408, and CDRs of the light chain variable domain, SEQ ID NOs: 409, 410, and 411.

[0347] The disclosure also provides affinity-matured antibodies or antigen-binding fragments thereof that bind to a complex comprising an AFP peptide and an MHC molecule (e.g., AFP158/HLA-A*02:01). The affinity-matured antibodies or antigen-binding fragments thereof can include one or amino acid substitutions, deletions, or insertion based on any one of the antibodies or antigen-binding fragments thereof described herein. In some embodiments, the affinity-matured antibodies or antigen-binding fragments thereof described herein include one or more amino acid substitutions based on antibody AS170036, or a humanized antibody or antigen binding fragment thereof of AS170036. In some embodiments, the affinity-matured antibodies or antigen-binding fragments thereof described herein include one or more amino acid substitutions based on humanized antibody AS170036 VH1VL1.

[0348] Also provided herein are affinity-matured antibodies or antigen-binding fragments thereof comprising: a heavy chain variable region (VH) comprising complementarity determining regions (CDRs) 1, 2, and 3; and a light chain variable region (VL) comprising CDRs 1, 2, and 3, wherein: (a) the VH CDR1 comprises GFTFSSYAMS (SEQ ID NO:78); (b) the VH CDR2 comprises is TINX₁GTX₂X₃X₄YYADSVKG (SEQ ID NO: 341) or AINSGGGSTYYADSVKG (SEQ ID NO: 123); and (c) the VH CDR3 comprises NFX₅X₆GSX₇X₈X₉X₁₀X₁₁X₁₂AMDY (SEQ ID NO: 342) or AASGYGGSWWGDATLDA (SEQ ID NO: 125); (d) the VL CDR1 comprises AGTSSDVGSX₁₃NX₁₄VS (SEQ ID NO: 343) or QGGGYYVN (SEQ ID NO: 129); (e) the VL CDR2 comprises QVNKRAS (SEQ ID NO: 88) or LNTNRPS (SEQ ID NO: 131); and (f) the VL CDR3 comprises ASX₁₅RSSX₁₆X₁₇NIV (SEQ ID NO: 344) or LNTNRPS (SEQ ID NO: 131).

[0349] A list of amino acid residues for each of X₁-X₁₇ are listed in Table 1 below. The amino acid residue for each of X₁-X₁₇ can be any one of the corresponding amino acid residues listed in Table 1.

TABLE 1
Amino Acid Residues for the VH CDRs and VL CDRs of
the Antibodies and Antigen-binding Fragments Thereof

| Position | Amino acid |
|---|---|
| X₁ | S, A, T |
| X₂ | G, A, D, E, F, H, I, K, L, M, N, P, Q, R, S, T, V, W, Y |
| X₃ | S, A, D, F, H, K, M, N, Q, R, T, W, Y |
| X₄ | P, A, D, E, F, G, H, K, M, N, Q, R, S, T, V, W, Y |
| X₅ | F, D, H, N, W, Y |
| X₆ | D, A, E, G, I, L, M, N, P, Q, S, T, V, W |
| X₇ | W, F, M |
| X₈ | F, W |
| X₉ | L, A, G, I, M, N, Q, S, T, V |
| X₁₀ | G, A, D, E, F, H, I, L, M, N, Q, R, S, T, V, W, Y |
| X₁₁ | P, A, N, T |
| X₁₂ | P, A, D, E, G, I, L, N, Q, S, T, V |
| X₁₃ | E, A, D, G, H, I, L, M, N, P, Q, S, T, V, W, Y |
| X₁₄ | Y, A, D, E, F, G, H, I, L, M, P, S, T, V, W |
| X₁₅ | Y, D, F, H, I, L, M, N, Q, T, V, W |
| X₁₆ | D, A, E, F, G, H, I, K, L, M, N, P, Q, R, S, T, V, W, Y |
| X₁₇ | H, A, D, F, G, I, K, L, M, N, P, Q, R, S, T, V, W, Y |

In some embodiments, the amino acid residue for each of X₁-X₁₇ is selected from:
[0350] X₁ is S;
[0351] X₂ is G, A, D, E, F, H, K, L, M, N, Q, R, S, T, W, or Y;
[0352] X₃ is S, A, D, F, H, K, M, N, Q, R, T, W, or Y;
[0353] X₄ is P, A, E, G, or Q;
[0354] X₅ is F, W, or Y;
[0355] X₆ is D or E;
[0356] X₇ is W;
[0357] X₈ is F;
[0358] X₉ is L, I, M, or N;
[0359] X₁₀ is G, A, D, E, L, M, N, Q, S, T, or V;
[0360] X₁₁ is P;
[0361] X₁₂ is P, A, D, E, G, Q, S, T, or V;
[0362] X₁₃ is E, D, G, S, W, or Y;
[0363] X₁₄ is Y, H, or W;
[0364] X₁₅ is Y, F, I, L, M, Q, V, or W;
[0365] X₁₆ is D, A, F, G, H, K, N, R, S, or T; and
[0366] X₁₇ is H, A, F, G, I, L, M, N, P, Q, R, S, T, V, W, or Y.
   In some embodiments, the amino acid residue for each of X₁-X₁₇ is selected from:
[0367] X₁ is S;
[0368] X₂ is G, Y, N, or F;
[0369] X₃ is S, R, Q, M, K, or H;
[0370] X₄ is P;
[0371] X₅ is F;
[0372] X₆ is D;
[0373] X₇ is W;
[0374] X₈ is F;
[0375] X₉ is L;
[0376] X₁₀ is G, S, N, M, E, D, or A;
[0377] X₁₁ is P;
[0378] X₁₂ is P;
[0379] X₁₃ is E, or W;
[0380] X₁₄ is Y,
[0381] X₁₅ is Y,
[0382] X₁₆ is D; and
[0383] X₁₇ is H, V, T, Q, P, I, F, or A.

[0384] In one aspect, the disclosure relates to an antibody or antigen-binding fragment thereof that binds to a complex comprising an AFP peptide and an MHC molecule, comprising: a heavy chain variable region (VH) comprising VH complementarity determining regions (CDRs) 1, 2, and 3; and a light chain variable region (VL) comprising VL CDRs 1, 2, and 3, wherein:
[0385] (a) the VH CDR1 comprises GFTFLNYAMS (SEQ ID NO:95);
[0386] (b) the VH CDR2 comprises SNSGAGSTYYSDSVKG (SEQ ID NO:97) or SNSGAGSTYYADSVKG (SEQ ID NO:337); and
[0387] (c) the VH CDR3 comprises GTNVGSWSSLHY (SEQ ID NO: 99);
[0388] (d) the VL CDR1 comprises TGSSNNIGGNYVN (SEQ ID NO: 103), TGSSSNIGGNYVN (SEQ ID NO: 112), SGSSNNIGGNYVN (SEQ ID NO: 338), or SGSSSNIGGNYVN (SEQ ID NO: 339);
[0389] (e) the VL CDR2 comprises DNKNRPS (SEQ ID NO: 105) or DNSNRAS (SEQ ID NO: 114); and
[0390] (f) the VL CDR3 comprises ASWDDSLSAVV (SEQ ID NO: 107) or ASWDDSLSGAV (SEQ ID NO: 116).

[0391] In some embodiments, the affinity-matured antibodies or antigen-binding fragments thereof described herein include various antibodies as shown in FIG. 28B, e.g., AS170036 VL1VH1-VHG56Y, AS170036 VL1VH1-VHS57K, AS170036 VL1VH1-VHS57H, AS170036 VL1VH1-VHG108D, AS170036 VL1VH1-VHG108A, AS170036 VL1VH1-56N98I, AS170036 VL1VH1-57M98Q, AS170036 VL1VH1-56N108A, AS170036 VL1VH1-57K108S, AS170036 VL1VH1-981108A, AS170036 VL1VH1-56Y98I108S, and AS170036 VL1VH1-56Y98Q108S. Their CDR sequences are shown in FIG. 28B.

[0392] Furthermore, in some embodiments, the antibodies or antigen-binding fragments thereof described herein can also contain one, two, or three heavy chain variable region CDRs selected from VH CDRs in FIGS. 28A, 28B, 30A, 30B, and 30C, and one, two, or three light chain variable region CDRs selected from VL CDRs in FIGS. 28A, 28B, 30A, 30B, and 30C. These CDR sequences can be determined by a combination of Kabat and AbM definitions. In some embodiments, the VL CDR1, VL CDR2, VL CDR3, VH CDR2, and VH CDR3 are determined by Kabat definitions. In some embodiments, the VH CDR1 is determined by a combination of Kabat and AbM, e.g., the VH CDR1 can start 5 residues before the typical Kabat definition. The AbM definition is a compromise between Kabat and Chothia definitions based on that used by Martin et al. (Martin et al., 1989) and used by Oxford Molecular's AbM antibody modelling software (Martin A C R, 2010).

[0393] In some embodiments, the antibodies can have a heavy chain variable region (VH) comprising complementarity determining regions (CDRs) 1, 2, 3, wherein the CDR1 region comprises or consists of an amino acid sequence that is at least 80%, 85%, 90%, 95%, 96%, 97%, 98%, 99% or 100% identical to a selected VH CDR1 amino acid sequence, the CDR2 region comprises or consists of an amino acid sequence that is at least 80%, 85%, 90%, 95%, 96%, 97%, 98%, 99% or 100% identical to a selected VH CDR2 amino acid sequence, and the CDR3 region comprises or consists of an amino acid sequence that is at least 80%, 85%, 90%, 95%, 96%, 97%, 98%, 99% or 100% identical to a selected VH CDR3 amino acid sequence. In some embodiments, the antibodies can have a light chain variable region (VL) comprising CDRs 1, 2, 3, wherein the CDR1 region comprises or consists of an amino acid sequence that is at least 80%, 85%, 90%, 95%, 96%, 97%, 98%, 99% or 100% identical to a selected VL CDR1 amino acid sequence, the CDR2 region comprises or consists of an amino acid sequence that is at least 80%, 85%, 90%, 95%, 96%, 97%, 98%, 99% or 100% identical to a selected VL CDR2 amino acid sequence, and the CDR3 region comprises or consists of an amino acid sequence that is at least 80%, 85%, 90%, 95%, 96%, 97%, 98%, 99% or 100% identical to a selected VL CDR3 amino acid sequence. The selected VH CDRs 1, 2, 3 amino acid sequences and the selected VL CDRs, 1, 2, 3 amino acid sequences are shown in FIGS. 28A, 28B, 30A, 30B, and 30C.

[0394] In some embodiments, the antibody or an antigen-binding fragment described herein can contain a heavy chain variable domain containing one, two, or three of the CDRs in FIGS. 28A, 28B, 30A, 30B, and 30C with zero, one or two amino acid insertions, deletions, or substitutions in each of the CDRs. In some embodiments, the antibody or an antigen-binding fragment described herein can contain a light chain variable domain containing one, two, or three of the CDRs in FIGS. 28A, 28B, 30A, 30B, and 30C with zero, one or two amino acid insertions, deletions, or substitutions in each of the CDRs.

[0395] The amino acid sequences for heavy chain variable regions and light variable regions of the various antibodies are also provided. As there are different ways to humanize an antibody (e.g., a sequence can be modified with different amino acid substitutions), the heavy chain and the light chain of an antibody can have more than one version of humanized sequences.

[0396] The disclosure also provides antibodies or antigen-binding fragments thereof that bind to an AFP/MHC complex. The antibodies or antigen-binding fragments thereof contain a heavy chain variable region (VH) comprising or consisting of an amino acid sequence that is at least 80%, 85%, 90%, 95%, 96%, 97%, 98% or 99% identical to a selected VH sequence, and a light chain variable region (VL) comprising or consisting of an amino acid sequence that is at least 80%, 85%, 90%, 95%, 96%, 97%, 98% or 99% identical to a selected VL sequence. In some embodiments, the selected VH sequence and the selected VL sequences are derived from AS170036, AS179723, AS179732, AS190259, AS148691, AS176934, AS176951, AS176992, AS177005, AS170030, and their humanized sequences.

[0397] The amino acid sequence for the heavy chain variable region of antibody AS170036 is set forth in SEQ ID NO:76. The amino acid sequence for the light chain variable region of AS170036 antibody is set forth in SEQ ID NO: 84. The amino acid sequences for the heavy chain variable regions of humanized AS170036 antibody are set forth in SEQ ID NOs: 168 and 169. The amino acid sequences for the light chain variable regions of humanized AS170036 antibody are set forth in SEQ ID NOs: 170, and 171. Any of these heavy chain variable region sequences (SEQ ID NOs: 76, 168, and 169) can be paired with any of these light chain variable region sequences (SEQ ID NOs: 84, 170 and 171).

[0398] The amino acid sequence for the heavy chain variable region of antibody AS179723 is set forth in SEQ ID NO:93. The amino acid sequence for the light chain variable region of AS179723 antibody is set forth in SEQ ID NO: 101. The amino acid sequences for the heavy chain variable region of humanized AS179723 antibody are set forth in SEQ ID NOs: 172, 173, and 174. The amino acid sequences for the light chain variable region of humanized AS179723 antibody are set forth in SEQ ID NOs: 175, and 176. Any of these heavy chain variable region sequences (SEQ ID NOs: 93, 172, 173, and 174) can be paired with any of these light chain variable region sequences (SEQ ID NOs: 101, 175, and 176).

[0399] The amino acid sequence for the heavy chain variable region of antibody AS179732 is set forth in SEQ ID NO:93. The amino acid sequence for the light chain variable region of AS179732 antibody is set forth in SEQ ID NO: 110. The amino acid sequences for the heavy chain variable region of humanized AS179732 antibody are set forth in SEQ ID NOs: 172, 173, and 174. The amino acid sequences for the light chain variable region of humanized AS179732 antibody are set forth in SEQ ID NOs: 177 and 178. Any of these heavy chain variable region sequences (SEQ ID NO: 93, 172, 173, and 174) can be paired with any of these light chain variable region sequences (SEQ ID NO: 110, 177, and 178).

[0400] The amino acid sequence for the heavy chain variable region of camel antibody AS190259 is set forth in SEQ ID NO:119. The amino acid sequence for the light chain variable region of AS190259 antibody is set forth in SEQ ID NO: 127. The amino acid sequences for the heavy chain variable region of humanized AS190259 antibody are set forth in SEQ ID NOs: 179 and 180. The amino acid sequences for the light chain variable region of humanized AS190259 antibody are set forth in SEQ ID NOs: 181 and 182. Any of these heavy chain variable region sequences (SEQ ID NOs: 119, 179, and 180) can be paired with any of these light chain variable region sequences (SEQ ID NOs: 127, 181, and 182).

[0401] The amino acid sequence for the heavy chain variable region of antibody AS148691 is set forth in SEQ ID NO:136. The amino acid sequence for the light chain variable region of AS148691 antibody is set forth in SEQ ID NO: 144.

[0402] The amino acid sequence for the heavy chain variable region of antibody AS176934 is set forth in SEQ ID NO: 368. The amino acid sequence for the light chain variable region of AS176934 antibody is set forth in SEQ ID NO: 369.

[0403] The amino acid sequence for the heavy chain variable region of antibody AS176951 is set forth in SEQ ID NO: 377. The amino acid sequence for the light chain variable region of AS176951 antibody is set forth in SEQ ID NO: 378.

[0404] The amino acid sequence for the heavy chain variable region of antibody AS176992 is set forth in SEQ ID NO: 386. The amino acid sequence for the light chain variable region of AS176951 antibody is set forth in SEQ ID NO: 387.

[0405] The amino acid sequence for the heavy chain variable region of antibody AS177005 is set forth in SEQ ID NO: 395. The amino acid sequence for the light chain variable region of AS177005 antibody is set forth in SEQ ID NO: 396.

[0406] The amino acid sequence for the heavy chain variable region of antibody AS170030 is set forth in SEQ ID NO: 404. The amino acid sequence for the light chain variable region of AS170030 antibody is set forth in SEQ ID NO: 405.

[0407] Humanization percentage means the percentage identity of the heavy chain or light chain variable region sequence as compared to human antibody sequences in International Immunogenetics Information System (IMGT) database. In some embodiments, humanization percentage is greater than 80%, 81%, 82%, 83%, 84%, 85%, 86%, 87%, 88%, 89%, 90%, 91%, 92%, 93%, 94%, or 95%. A detailed description regarding how to determine humanization percentage and how to determine top hits is known in the art, and is described, e.g., in Jones, Tim D., et al, MAbs. Vol. 8. No. 1. Taylor & Francis, 2016, which is incorporated herein by reference in its entirety. A high humanization percentage often has various advantages, e.g., more safe and more effective in humans, more likely to be tolerated by a human subject, and/or less likely to have side effects.

[0408] Furthermore, in some embodiments, the antibodies or antigen-binding fragments thereof described herein can also contain one, two, or three heavy chain variable region CDRs (in any order) selected from the groups of SEQ ID NOs for each antibody or antigen-binding fragment listed in FIGS. 28A, 28B, 30A, 30B, and 30C, and/or one, two, or three light chain variable region CDRs (in any order) selected from the groups of SEQ ID NOs for each antibody or antigen-binding fragment listed in FIGS. 28A, 28B, 30A, 30B, and 30C. In some embodiments, the antibody or an antigen-binding fragment described herein can contain a heavy chain variable domain containing one, two, or three of the CDRs of any one of the heavy chain CDRs of the antibodies or antigen-binding fragments thereof described herein with zero, one or two amino acid insertions, deletions, or substitutions. In some embodiments, the antibody or an antigen-binding fragment described herein can contain a light chain variable domain containing one, two, or three of the CDRs of any one of the light chain CDRs of the antibodies or antigen-binding fragments thereof described herein with zero, one or two amino acid insertions, deletions, or substitutions. The insertions, deletions, and substitutions can be within the CDR sequence, or at one or both terminal ends of the CDR sequence.

[0409] The disclosure also provides antibodies or antigen-binding fragments thereof that bind to a complex comprising an AFP peptide and an MHC molecule (e.g., AFP158/HLA-A*02:01). The antibodies or antigen-binding fragments thereof contain a heavy chain variable region (VH) comprising or consisting of an amino acid sequence that is at least 80%, 85%, 90%, or 95% identical to a selected VH sequence or the VH of a selected scFv, and a light chain variable region (VL) comprising or consisting of an amino acid sequence that is at least 80%, 85%, 90%, or 95% identical to a selected VL sequence or the VL of a selected scFv.

[0410] In some embodiments, the selected VH sequence is selected from SEQ ID NOs: 76, 168, and 169, and the selected VL sequence is selected from SEQ ID NOs: 84, 170, and 171. In some embodiments, the selected scFv is selected from SEQ ID NOs: 75, 183, and 191-296. In some embodiments, the VH is at least 80%, 85%, 90%, 95% or 100% identical to amino acids 127-251 of a sequence selected from SEQ ID NO: 75, 183, and 191-296; and the VL is at least 80%, 85%, 90%, 95% or 100% identical to amino acids 1-111 of a sequence selected from SEQ ID NO: 75, 183, and 191-296.

[0411] In some embodiments, the selected VH sequence is selected from SEQ ID NOs: 93, 172, 173, and 174, and the selected VL sequence is selected from SEQ ID NOs: 101, 175, and 176. In some embodiments, the selected scFv is selected from SEQ ID NOs: 92 and 185.

[0412] In some embodiments, the selected VH sequence is selected from SEQ ID NOs: 93, 172, 173, and 174, and the selected VL sequence is selected from SEQ ID NOs: 110, 177, and 178. In some embodiments, the selected scFv is selected from SEQ ID NOs: 109 and 187.

[0413] In some embodiments, the selected VH sequence is selected from SEQ ID NOs: 119, 179, and 180, and the selected VL sequence is selected from SEQ ID NOs: 127, 181, and 182. In some embodiments, the selected scFv is selected from SEQ ID NOs: 118 and 189.

[0414] In some embodiments, the selected VH sequence is SEQ ID NO: 136, and the selected VL sequence is SEQ ID NO: 144. In some embodiments, the selected scFv is SEQ ID NO: 135.

[0415] In some embodiments, the selected VH sequence is SEQ ID NO: 368, and the selected VL sequence is SEQ ID NO: 369. In some embodiments, the selected scFv is SEQ ID NO: 367.

[0416] In some embodiments, the selected VH sequence is SEQ ID NO: 377, and the selected VL sequence is SEQ ID NO: 378. In some embodiments, the selected scFv is SEQ ID NO: 376.

[0417] In some embodiments, the selected VH sequence is SEQ ID NO: 386, and the selected VL sequence is SEQ ID NO: 387. In some embodiments, the selected scFv is SEQ ID NO: 385.

[0418] In some embodiments, the selected VH sequence is SEQ ID NO: 395, and the selected VL sequence is SEQ ID NO: 396. In some embodiments, the selected scFv is SEQ ID NO: 394.

[0419] In some embodiments, the selected VH sequence is SEQ ID NO: 404, and the selected VL sequence is SEQ ID NO: 405. In some embodiments, the selected scFv is SEQ ID NO: 403.

[0420] The disclosure also provides nucleic acid comprising a polynucleotide encoding a polypeptide comprising an immunoglobulin heavy chain or an immunoglobulin light chain. The immunoglobulin heavy chain or immunoglobulin light chain comprises CDRs of any one of the antibodies or antigen binding fragments thereof described herein, or have sequences of the immunoglobulin heavy chain or immunoglobulin light chain of any one of the antibodies or antigen binding fragments thereof described herein. When the polypeptides are paired with corresponding polypeptide (e.g., a corresponding heavy chain variable region or a corresponding light chain variable region), the paired polypeptides bind to a complex comprising an AFP peptide and an MHC molecule (e.g., AFP158/HLA-A*02:01).

[0421] In some embodiments, the nucleic acid described herein comprises a polynucleotide encoding a polypeptide comprising an immunoglobulin heavy chain or a fragment thereof comprising a heavy chain variable region (VH) comprising complementarity determining regions (CDRs) 1, 2, and 3 comprising the amino acid sequences set forth in SEQ ID NOs: 78, 80, and 82, respectively, and wherein the VH, when paired with a light chain variable region (VL) comprising the amino acid sequence set forth in SEQ ID NO: 84, 170 or 171 binds to a complex comprising a human AFP peptide and an MHC molecule.

[0422] In some embodiments, the nucleic acid described herein comprises a polynucleotide encoding a polypeptide comprising an immunoglobulin light chain or a fragment thereof comprising a VL comprising CDRs 1, 2, and 3 comprising the amino acid sequences set forth in SEQ ID NOs: 86, 88, and 90, respectively, and wherein the VL, when paired with a VH comprising the amino acid sequence set forth in SEQ ID NO: 76, 168 or 169 binds to a complex comprising a human AFP peptide and an MHC molecule.

[0423] In some embodiments, the nucleic acid described herein comprises a polynucleotide encoding a polypeptide comprising an immunoglobulin heavy chain or a fragment thereof comprising a heavy chain variable region (VH) comprising CDRs 1, 2, and 3 comprising the amino acid sequences set forth in SEQ ID NOs: 95, 97, and 99, respectively, and wherein the VH, when paired with a light chain variable region (VL) comprising the amino acid sequence set forth in SEQ ID NO: 101, 175, 176, 177, or 178 binds to a complex comprising a human AFP peptide and an MHC molecule.

[0424] In some embodiments, the nucleic acid described herein comprises a polynucleotide encoding a polypeptide comprising an immunoglobulin heavy chain or a fragment thereof comprising a heavy chain variable region (VH) comprising CDRs 1, 2, and 3 comprising the amino acid sequences set forth in SEQ ID NOs: 95, 336, and 99, respectively, and wherein the VH, when paired with a light chain variable region (VL) comprising the amino acid sequence set forth in SEQ ID NO: 101, 175, 176, 177, or 178 binds to a complex comprising a human AFP peptide and an MHC molecule.

[0425] In some embodiments, the nucleic acid described herein comprises a polynucleotide encoding a polypeptide comprising an immunoglobulin heavy chain or a fragment thereof comprising a heavy chain variable region (VH) comprising CDRs 1, 2, and 3 comprising the amino acid sequences set forth in SEQ ID NOs: 95, 337, and 99, respectively, and wherein the VH, when paired with a light chain variable region (VL) comprising the amino acid sequence set forth in SEQ ID NO: 101, 175, 176, 177, or 178 binds to a complex comprising a human AFP peptide and an MHC molecule.

[0426] In some embodiments, the nucleic acid described herein comprises a polynucleotide encoding a polypeptide comprising an immunoglobulin light chain or a fragment thereof comprising a VL comprising CDRs 1, 2, and 3 comprising the amino acid sequences set forth in SEQ ID NOs: 103, 105, and 107, respectively, and wherein the VL, when paired with a VH comprising the amino acid sequence set forth in SEQ ID NO: 93, 172, 173, or 174 binds to a complex comprising a human AFP peptide and an MHC molecule.

[0427] In some embodiments, the nucleic acid described herein comprises a polynucleotide encoding a polypeptide comprising an immunoglobulin light chain or a fragment thereof comprising a VL comprising CDRs 1, 2, and 3 comprising the amino acid sequences set forth in SEQ ID NOs: 338, 105, and 107, respectively, and wherein the VL, when paired with a VH comprising the amino acid sequence set forth in SEQ ID NO: 93, 172, 173, or 174 binds to a complex comprising a human AFP peptide and an MHC molecule.

[0428] In some embodiments, the nucleic acid described herein comprises a polynucleotide encoding a polypeptide comprising an immunoglobulin light chain or a fragment thereof comprising a VL comprising CDRs 1, 2, and 3 comprising the amino acid sequences set forth in SEQ ID NOs: 112, 114, and 116, respectively, and wherein the VL, when paired with a VH comprising the amino acid sequence set forth in SEQ ID NO: 93, 172, 173, or 174 binds to a complex comprising a human AFP peptide and an MHC molecule.

[0429] In some embodiments, the nucleic acid described herein comprises a polynucleotide encoding a polypeptide comprising an immunoglobulin light chain or a fragment thereof comprising a VL comprising CDRs 1, 2, and 3 comprising the amino acid sequences set forth in SEQ ID NOs: 339, 114, and 116, respectively, and wherein the VL, when paired with a VH comprising the amino acid sequence set forth in SEQ ID NO: 93, 172, 173, or 174 binds to a complex comprising a human AFP peptide and an MHC molecule.

[0430] In some embodiments, the nucleic acid described herein comprises a polynucleotide encoding a polypeptide comprising an immunoglobulin heavy chain or a fragment thereof comprising a heavy chain variable region (VH) comprising CDRs 1, 2, and 3 comprising the amino acid sequences set forth in SEQ ID NOs: 121, 123, and 125, respectively, and wherein the VH, when paired with a light chain variable region (VL) comprising the amino acid sequence set forth in SEQ ID NO: 127, 181 or 182 binds to a complex comprising a human AFP peptide and an MHC molecule.

[0431] In some embodiments, the nucleic acid described herein comprises a polynucleotide encoding a polypeptide comprising an immunoglobulin heavy chain or a fragment thereof comprising a heavy chain variable region (VH) comprising CDRs 1, 2, and 3 comprising the amino acid sequences set forth in SEQ ID NOs: 121, 340, and 125, respectively, and wherein the VH, when paired with a light chain variable region (VL) comprising the amino acid sequence set forth in SEQ ID NO: 127, 181 or 182 binds to a complex comprising a human AFP peptide and an MHC molecule.

[0432] In some embodiments, the nucleic acid described herein comprises a polynucleotide encoding a polypeptide comprising an immunoglobulin light chain or a fragment thereof comprising a VL comprising CDRs 1, 2, and 3 comprising the amino acid sequences set forth in SEQ ID NOs: 129, 131, 133, respectively, and wherein the VL, when paired with a VH comprising the amino acid sequence set forth in SEQ ID NO: 119, 179 or 180 binds to a complex comprising a human AFP peptide and an MHC molecule.

[0433] In some embodiments, the nucleic acid described herein comprises a polynucleotide encoding a polypeptide comprising an immunoglobulin heavy chain or a fragment thereof comprising a heavy chain variable region (VH) comprising CDRs 1, 2, and 3 comprising the amino acid sequences set forth in SEQ ID NOs: 138, 140, and 142, respectively, and wherein the VH, when paired with a light chain variable region (VL) comprising the amino acid sequence set forth in SEQ ID NO: 144 binds to a complex comprising a human AFP peptide and an MHC molecule.

[0434] In some embodiments, the nucleic acid described herein comprises a polynucleotide encoding a polypeptide comprising an immunoglobulin light chain or a fragment thereof comprising a VL comprising CDRs 1, 2, and 3 comprising the amino acid sequences set forth in SEQ ID NOs: 146, 148, and 150, respectively, and wherein the VL, when paired with a VH comprising the amino acid sequence set forth in SEQ ID NO: 136 binds to a complex comprising a human AFP peptide and an MHC molecule.

[0435] In some embodiments, the nucleic acid described herein comprises a polynucleotide encoding a polypeptide comprising an immunoglobulin heavy chain or a fragment thereof comprising a heavy chain variable region (VH) comprising CDRs 1, 2, and 3 comprising the amino acid sequences set forth in SEQ ID NOs: 370-372, respectively, and wherein the VH, when paired with a light chain variable region (VL) comprising the amino acid sequence set forth in SEQ ID NO: 369 binds to a complex comprising a human AFP peptide and an MHC molecule.

[0436] In some embodiments, the nucleic acid described herein comprises a polynucleotide encoding a polypeptide comprising an immunoglobulin light chain or a fragment thereof comprising a VL comprising CDRs 1, 2, and 3 comprising the amino acid sequences set forth in SEQ ID NOs: 373-375, respectively, and wherein the VL, when paired with a VH comprising the amino acid sequence set forth in SEQ ID NO: 368 binds to a complex comprising a human AFP peptide and an MHC molecule.

[0437] In some embodiments, the nucleic acid described herein comprises a polynucleotide encoding a polypeptide comprising an immunoglobulin heavy chain or a fragment thereof comprising a heavy chain variable region (VH) comprising CDRs 1, 2, and 3 comprising the amino acid sequences set forth in SEQ ID NOs: 379-381, respectively, and wherein the VH, when paired with a light chain variable region (VL) comprising the amino acid sequence set forth in SEQ ID NO: 378 binds to a complex comprising a human AFP peptide and an MHC molecule.

[0438] In some embodiments, the nucleic acid described herein comprises a polynucleotide encoding a polypeptide comprising an immunoglobulin light chain or a fragment thereof comprising a VL comprising CDRs 1, 2, and 3 comprising the amino acid sequences set forth in SEQ ID NOs: 382-384, respectively, and wherein the VL, when paired with a VH comprising the amino acid sequence set forth in SEQ ID NO: 377 binds to a complex comprising a human AFP peptide and an MHC molecule.

[0439] In some embodiments, the nucleic acid described herein comprises a polynucleotide encoding a polypeptide comprising an immunoglobulin heavy chain or a fragment thereof comprising a heavy chain variable region (VH) comprising CDRs 1, 2, and 3 comprising the amino acid sequences set forth in SEQ ID NOs: 388-390, respectively, and wherein the VH, when paired with a light chain variable region (VL) comprising the amino acid sequence set forth in SEQ ID NO: 387 binds to a complex comprising a human AFP peptide and an MHC molecule.

[0440] In some embodiments, the nucleic acid described herein comprises a polynucleotide encoding a polypeptide comprising an immunoglobulin light chain or a fragment thereof comprising a VL comprising CDRs 1, 2, and 3 comprising the amino acid sequences set forth in SEQ ID NOs: 391-393, respectively, and wherein the VL, when paired with a VH comprising the amino acid sequence set forth in SEQ ID NO: 386 binds to a complex comprising a human AFP peptide and an MHC molecule.

[0441] In some embodiments, the nucleic acid described herein comprises a polynucleotide encoding a polypeptide comprising an immunoglobulin heavy chain or a fragment thereof comprising a heavy chain variable region (VH) comprising CDRs 1, 2, and 3 comprising the amino acid sequences set forth in SEQ ID NOs: 397-399, respectively, and wherein the VH, when paired with a light chain variable region (VL) comprising the amino acid sequence set forth in SEQ ID NO: 396 binds to a complex comprising a human AFP peptide and an MHC molecule.

[0442] In some embodiments, the nucleic acid described herein comprises a polynucleotide encoding a polypeptide comprising an immunoglobulin light chain or a fragment thereof comprising a VL comprising CDRs 1, 2, and 3 comprising the amino acid sequences set forth in SEQ ID NOs: 400-402, respectively, and wherein the VL, when paired with a VH comprising the amino acid sequence set forth in SEQ ID NO: 395 binds to a complex comprising a human AFP peptide and an MHC molecule.

[0443] In some embodiments, the nucleic acid described herein comprises a polynucleotide encoding a polypeptide comprising an immunoglobulin heavy chain or a fragment thereof comprising a heavy chain variable region (VH) comprising CDRs 1, 2, and 3 comprising the amino acid sequences set forth in SEQ ID NOs: 406-408, respectively, and wherein the VH, when paired with a light chain variable region (VL) comprising the amino acid sequence set forth in SEQ ID NO: 405 binds to a complex comprising a human AFP peptide and an MHC molecule.

[0444] In some embodiments, the nucleic acid described herein comprises a polynucleotide encoding a polypeptide comprising an immunoglobulin light chain or a fragment thereof comprising a VL comprising CDRs 1, 2, and 3 comprising the amino acid sequences set forth in SEQ ID NOs: 409-411, respectively, and wherein the VL, when paired with a VH comprising the amino acid sequence set forth in SEQ ID NO: 404 binds to a complex comprising a human AFP peptide and an MHC molecule.

[0445] The disclosure also provides nucleic acid sequences encoding the VH and the VL as described herein and a sequence that is at least 80%, 85%, 90%, 91%, 92%, 93%, 94%, 95%, 96%, 97%, 98%, or 99% identical to these sequences. The VH, VL and CDRs have sequences as shown in FIG. 28A. Examples of nucleic acid sequences encoding selected VH, VL, and corresponding CDRs are summarized in the table below.

TABLE 2
Polynucleotide Sequences Encoding Selected Antibodies
or Antigen Binding Fragments Thereof

| | | VH | VH | VH | | VL | VL | VL |
|---|---|---|---|---|---|---|---|---|
| | VH | CDR1 | CDR2 | CDR3 | VL | CDR1 | CDR2 | CDR3 |
| AS170036 | 77 | 79 | 81 | 83 | 85 | 87 | 89 | 91 |
| AS179723 | 94 | 96 | 98 | 100 | 102 | 104 | 106 | 108 |
| AS179732 | 94 | 96 | 98 | 100 | 111 | 113 | 115 | 117 |
| AS190259 | 120 | 122 | 124 | 126 | 128 | 130 | 132 | 134 |
| AS148691 | 137 | 139 | 141 | 143 | 145 | 147 | 149 | 151 |

### Heavy Chain Single Variable Domain (V_{H}H) Antibodies

[0446] Like all mammals, camelids (e.g., llamas) can produce conventional antibodies made of two heavy chains and two light chains bound together with disulfide bonds in a Y shape (e.g., IgG1). However, they also produce two unique subclasses of IgG: IgG2 and IgG3, also known as heavy chain IgG. These antibodies are made of only two heavy chains, which lack the CH1 region but still bear an antigen-binding domain at their N-terminus called V_{H}H (or nanobody). The unique feature of heavy chain IgG is the capacity of their monomeric antigen binding regions to bind antigens with specificity, affinity, and especially diversity that are comparable to conventional antibodies without the need of pairing with another region.

[0447] V_{H}Hs offer numerous other advantages compared to conventional antibodies carrying variable domains (VH and VL), including higher stability, solubility, expression yields, and refolding capacity, as well as better in vivo tissue penetration. Moreover, in contrast to the VH domains of conventional antibodies, V_{H}Hs do not display an intrinsic tendency to bind to light chains. This facilitates the induction of heavy chain antibodies in the presence of a functional light chain loci. Further, since V_{H}Hs do not bind to VL domains, it is much easier to reformat V_{H}Hs into bispecific antibody constructs than constructs containing conventional VH-VL pairs or single domains based on VH domains.

[0448] The disclosure provides e.g., antibodies, the modified antibodies thereof, the chimeric antibodies thereof, and the humanized antibodies thereof.

[0449] The CDR sequences for heavy chain single variable domain (V_{H}H) AS167821 include CDRs of the heavy chain variable domain, SEQ ID NOs: 154, 156, and 158.

[0450] The CDR sequences for heavy chain single variable domain (V_{H}H) AS167830 include CDRs of the heavy chain variable domain, SEQ ID NOs: 162, 164, and 166.

[0451] The nucleic acid sequence and the encoded amino acid sequence for the V_{H}H domain of AS167821 antibody is set forth in SEQ ID NO: 153 and SEQ ID NO: 152, respectively.

[0452] The nucleic acid sequence and the encoded amino acid sequence for the V_{H}H domain of AS167830 antibody is set forth in SEQ ID NO: 161 and SEQ ID NO: 160, respectively.

[0453] The amino acid sequences for various modified or humanized V_{H}H are also provided. As there are different ways to modify or humanize a llama antibody (e.g., a sequence can be modified with different amino acid substitutions), the V_{H}H of an antibody can have more than one version of humanized sequences. In some embodiments, the humanized V_{H}H domain is at least 80%, 85%, 90%, 91%, 92%, 93%, 94%, 95%, 96%, 97%, 98%, or 99% identical to any sequence of SEQ ID NOS: 152 or 160.

[0454] Furthermore, in some embodiments, the antibodies or antigen-binding fragments thereof described herein can also contain one, two, or three V_{H}H domain CDRs selected from the group of SEQ ID NOs: 154, 156, and 158; SEQ ID NOs: 162, 164, and 166. In some embodiments, these CDRs are determined by AbM definition.

[0455] In some embodiments, the antibodies can have a heavy chain single variable domain (V_{H}H) comprising CDRs 1, 2, 3, wherein the CDR1 region comprises or consists of an amino acid sequence that is at least 80%, 85%, 90%, or 95% identical to a selected V_{H}H CDR1 amino acid sequence, the CDR2 region comprises or consists of an amino acid sequence that is at least 80%, 85%, 90%, or 95% identical to a selected V_{H}H CDR2 amino acid sequence, and the CDR3 region comprises or consists of an amino acid sequence that is at least 80%, 85%, 90%, or 95% identical to a selected V_{H}H CDR3 amino acid sequence. The selected V_{H}H CDRs 1, 2, 3 amino acid sequences as determined by AbM definition are shown in FIG. 29.

[0456] In some embodiments, the antibody or an antigen-binding fragment described herein can contain a heavy chain single variable domain (V_{H}H) containing one, two, or three of V_{H}H CDR1 with zero, one or two amino acid insertions, deletions, or substitutions; V_{H}H CDR2 with zero, one or two amino acid insertions, deletions, or substitutions; V_{H}H CDR3 with zero, one or two amino acid insertions, deletions, or substitutions, wherein V_{H}H CDR1, V_{H}H CDR2, and V_{H}H CDR3 are selected from the CDRs in FIG. 29.

[0457] In some embodiments, the antibody or an antigen-binding fragment described herein can contain a heavy chain single variable domain (V_{H}H) containing one, two, or three of the CDRs of SEQ ID NO: 154 with zero, one or two amino acid insertions, deletions, or substitutions; SEQ ID NO: 156 with zero, one or two amino acid insertions, deletions, or substitutions; SEQ ID NO: 158 with zero, one or two amino acid insertions, deletions, or substitutions.

[0458] In some embodiments, the antibody or an antigen-binding fragment described herein can contain a heavy chain single variable domain (V_{H}H) containing one, two, or three of the CDRs of SEQ ID NO: 162 with zero, one or two amino acid insertions, deletions, or substitutions; SEQ ID NO: 164 with zero, one or two amino acid insertions, deletions, or substitutions; SEQ ID NO: 166 with zero, one or two amino acid insertions, deletions, or substitutions.

[0459] The insertions, deletions, and substitutions can be within the CDR sequence, or at one or both terminal ends of the CDR sequence. In some embodiments, the CDR is determined based on Kabat numbering scheme. In some embodiments, the CDR is determined based on Chothia numbering scheme. In some embodiments, the CDR is determined based on AbM numbering scheme. In some embodiments, the CDR is determined based on a combination numbering scheme.

[0460] The disclosure also provides antibodies or antigen-binding fragments thereof contain a heavy chain single variable region (V_{H}H) comprising or consisting of an amino acid sequence that is at least 80%, 85%, 90%, 91%, 92%, 93%, 94%, 95%, 96%, 97%, 98%, or 99% identical to a selected V_{H}H sequence. In some embodiments, the selected V_{H}H sequence is SEQ ID NO: 152. In some embodiments, the selected V_{H}H sequence is SEQ ID NO: 160.

[0461] In some embodiments, the antibody or antigen-binding fragment thereof comprises a heavy chain single variable domain (V_{H}H) CDR1 selected from SEQ ID NOs: 154 and 162. In some embodiments, the antibody or antigen-binding fragment thereof comprises a heavy chain single variable domain (V_{H}H) CDR2 selected from SEQ ID NOs: 156 and 164. In some embodiments, the antibody or antigen-binding fragment thereof comprises a heavy chain single variable domain (V_{H}H) CDR3 selected from SEQ ID NOs: 158 and 166.

[0462] The disclosure provides antibodies and antigen-binding fragments thereof that specifically bind to a complex comprising an AFP peptide and a MHC molecule. The antigen binding domains of the CARs or fragments thereof described herein can be derived from these antibodies or antigen binding fragments thereof.

[0463] The disclosure also provides nucleic acid sequences encoding the immunoglobulin heavy chain single variable domains (V_{H}Hs) described herein and a sequence that is at least 80%, 85%, 90%, 91%, 92%, 93%, 94%, 95%, 96%, 97%, 98%, or 99% identical to these sequences. The V_{H}Hs comprise CDRs as shown in FIG. 29, or has sequences as shown in FIG. 29. Examples of nucleic acid sequences encoding selected V_{H}H and corresponding CDRs are summarized in the table below.

TABLE 3
Polynucleotide Sequences

| | V_{H}H | V_{H}H CDR1 | V_{H}H CDR2 | V_{H}H CDR3 |
|---|---|---|---|---|
| AS167821 | 153 | 155 | 157 | 159 |
| AS167830 | 161 | 163 | 165 | 167 |

### Car, Antibody, Antigen-Binding Fragment Characteristics

[0464] The CAR, the antibodies or antigen-binding fragments thereof described herein can bind to a complex comprising a complex comprising an AFP peptide and an MHC molecule (e.g., AFP158/HLA-A*02:01), and target cells that present a complex comprising an AFP peptide and an MHC molecule (e.g., AFP158/HLA-A*02:01) on the surface.

[0465] Thus, in some embodiments, the antibodies or antigen-binding fragments thereof described herein is a T cell receptor (TCR)-like antibody. The TCR-like antibodies can recognize peptide/MHC complexes, e.g., on cell surface. In some embodiments, the antibodies or antigen-binding fragments thereof described herein cannot bind to a peptide (e.g., an AFP peptide) in the absence of a MHC molecule. In some embodiments, the antibodies or antigen-binding fragments thereof described herein can bind to a peptide (e.g., an AFP peptide) in the absence of a MHC molecule. In some embodiments, the antibodies or antigen-binding fragments thereof described herein can bind to a peptide/MHC complex, wherein the peptide is ARNTL (SEQ ID NO. 4), ATG9A (SEQ ID NO. 5), BRCA2 (SEQ ID NO. 6), CDC14A (SEQ ID NO. 7), NR2E1 (SEQ ID NO. 8), OR1I1 (SEQ ID NO. 9), OR51B6 (SEQ ID NO. 10), OR6C1 (SEQ ID NO. 11), PTP4A1 (SEQ ID NO. 12), RP1 (SEQ ID NO. 13), RCL1 (SEQ ID NO. 14), ZNF566 (SEQ ID NO. 15). In some embodiments, the antibodies or antigen-binding fragments thereof described herein is specific to AFP158/MHC complex. In some embodiments, they cannot bind to a peptide/MHC complex, wherein the peptide is ARNTL (SEQ ID NO. 4), ATG9A (SEQ ID NO. 5), BRCA2 (SEQ ID NO. 6), CDC14A (SEQ ID NO. 7), NR2E1 (SEQ ID NO. 8), OR1I1 (SEQ ID NO. 9), OR51B6 (SEQ ID NO. 10), OR6C1 (SEQ ID NO. 11), PTP4A1 (SEQ ID NO. 12), RP1 (SEQ ID NO. 13), RCL1 (SEQ ID NO. 14), ZNF566 (SEQ ID NO. 15). In some embodiments, the MHC molecule is HLA-A*02:01, HLA-A*02:02, HLA-A*02:03, HLA-A*02:04, HLA-A*02:05, HLA-A*02:06, HLA-A*02:07, HLA-A*02:08, HLA-A*02:09, HLA-A*02:10, or HLA-A*02:11.

[0466] In some embodiments, the antibodies or antigen-binding fragments thereof described herein recognize one or more specific epitopes in the AFP158 peptide (SEQ ID NO: 3). In some embodiments, the epitopes include positions 2-9 of SEQ ID NO: 3. In some embodiments, the epitopes include positions 2, 3, 5-9 of SEQ ID NO: 3. In some embodiments, the epitopes include positions 1-5, 8, 9 of SEQ ID NO: 3. In some embodiments, the epitopes include positions 2, 4-9 of SEQ ID NO: 3. In some embodiments, the epitopes include positions 2, 7, 8 of SEQ ID NO: 3.

[0467] In some embodiments, the antibody (antigen-binding fragments thereof, or molecules derived therefrom, e.g., CAR) specifically binds to complex with a dissociation rate (k_{off}) of less than 0.1 s⁻¹, less than 0.01 s⁻¹, less than 0.001 s⁻¹, less than 0.0001 s⁻¹, or less than 0.00001 s⁻¹. In some embodiments, the dissociation rate (k_{off}) is greater than 0.01 s⁻¹, greater than 0.001 s⁻¹, greater than 0.0001 s⁻¹, greater than 0.00001 s⁻¹, or greater than 0.000001 s⁻¹.

[0468] In some embodiments, kinetic association rates (kₒₙ) is greater than 1×10²/Ms, greater than 1×10³/Ms, greater than 1×10⁴/Ms, greater than 1×10⁵/Ms, or greater than 1×10⁶/Ms. In some embodiments, kinetic association rates (kₒₙ) is less than 1×10⁵/Ms, less than 1×10⁶/Ms, or less than 1×10⁷/Ms.

[0469] Binding affinities can be deduced from the quotient of the kinetic rate constants (K_{D}=k_{off}/kₒₙ). In some embodiments, KD for the antibody, the antigen-binding fragments thereof, or molecules derived therefrom (e.g., CAR), is less than 1×10⁻⁶ M, less than 1×10⁻⁷ M, less than 1×10⁻⁸ M, less than 1×10⁻⁹ M, or less than 1×10⁻¹⁰ M. In some embodiments, the K_{D} is less than 800 nM, 700 nM, 600 nM, 500 nM, 400 nM, 300 nM, 200 nM, 100 nM, 90 nM, 80 nM, 70 nM, 60 nM, 50 nM, 40 nM, 30 nM, 20 nM, 10 nM, 9 nM, 8 nM, 7 nM, 6 nM, 5 nM, 4 nM, 3 nM, 2 nM, or 1 nM. In some embodiments, K_{D} is greater than 1×10⁻⁷ M, greater than 1×10⁻⁸ M, greater than 1×10⁻⁹ M, greater than 1×10⁻¹⁰ M, greater than 1×10⁻¹¹ M, or greater than 1×10⁻¹² M.

[0470] General techniques for measuring the affinity of an antibody for an antigen include, e.g., ELISA, RIA, and surface plasmon resonance (SPR). In some embodiments, the antibody binds to a complex comprising a human AFP peptide (e.g., human AFP158, SEQ ID NO:3) and an MHC molecule (e.g., AFP158/HLA-A*02:01).

[0471] In some embodiments, the binding affinities can be measured by EC₅₀, e.g., by methods as described in the present disclosure. In some embodiments, EC₅₀ is less than 10, 9, 8, 7, 6, 5, 4, 3, 2, or 1 nM.

[0472] In some embodiments, thermal stabilities are determined. The antibodies or antigen binding fragments as described herein can have a Tm greater than 60, 61, 62, 63, 64, 65, 66, 67, 68, 69, 70, 71, 72, 73, 74, 75, 76, 77, 78, 79, 80, 81, 82, 83, 84, 85, 86, 87, 88, 89, 90, 91, 92, 93, 94, or 95° C.

[0473] In some embodiments, the CAR, antibodies, or antigen-binding fragments thereof as described herein can increase immune response, activity or number of immune cells (e.g., T cells, CD8⁺ T cells, CD4+ T cells, macrophages, antigen presenting cells) by at least 10%, 20%, 30%, 40%, 50%, 60%, 70%, 80%, 90%, 100%, 2 folds, 3 folds, 5 folds, 10 folds, or 20 folds, as compared to that of immune cells in the absence of the CAR, antibodies, or antigen-binding fragments thereof.

[0474] In some embodiments, the method as described herein has a tumor growth inhibition percentage (TGI %) that is greater than 10%, 20%, 30%, 40%, 50%, 60%, 70%, 80%, 90%, 100%, 110%, 120%, 130%, 140%, 150%, 160%, 170%, 180%, 190%, or 200%. In some embodiments, the antibody or the CAR has a tumor growth inhibition percentage that is less than 60%, 70%, 80%, 90%, 100%, 110%, 120%, 130%, 140%, 150%, 160%, 170%, 180%, 190%, or 200%. The TGI % can be determined, e.g., at 3, 4, 5, 6, 7, 8, 9, 10, 11, 12, 13, 14, 15, 16, 17, 18, 19, 20, 21, 22, 23, 24, 25, 26, 27, 28, 29, or 30 days after the treatment starts, or 1, 2, 3, 4, 5, 6, 7, 8, 9, 10, 11, or 12 months after the treatment starts. As used herein, the tumor growth inhibition percentage (TGI %) is calculated using the following formula:

$$TGI ( \% ) = [ 1 - ( T i - T0 ) / ( Vi - V 0 ) ] \times 100$$

[0475] Ti is the average tumor volume in the treatment group on day i. T0 is the average tumor volume in the treatment group on day zero. Vi is the average tumor volume in the control group on day i. V0 is the average tumor volume in the control group on day zero.

[0476] In some embodiments, the antibodies or antigen binding fragments as described herein can effectively kill cells expressing AFP158 (e.g., AFP158/T2 cells). In some embodiments, at least 20%, 30%, 40%, 50%, 60%, 70%, 80% or 90% cells can be killed (e.g., with at least or about 30 nM, 20 nM, 10 nM, 5 nM, 3 nM, 1 nM, or 1 pM of the antibodies or antigen binding fragments thereof).

[0477] In some embodiments, the antibodies or antigen binding fragments have a functional Fc region. In some embodiments, effector function of a functional Fc region is antibody-dependent cell-mediated cytotoxicity (ADCC). In some embodiments, effector function of a functional Fc region is phagocytosis. In some embodiments, effector function of a functional Fc region is ADCC and phagocytosis. In some embodiments, the Fc region is human IgG1, human IgG2, human IgG3, or human IgG4.

[0478] In some embodiments, the antibodies or antigen binding fragments do not have a functional Fc region. For example, the antibodies or antigen binding fragments are Fab, Fab′, F(ab′)₂, and Fv fragments.

[0479] The antibodies and antigen-binding fragments described herein can also be antibody variants (including derivatives and conjugates) of antibodies or antibody fragments and multi-specific (e.g., bi-specific) antibodies or antibody fragments. Additional antibodies provided herein are polyclonal, monoclonal, multi-specific (multimeric, e.g., bi-specific), human antibodies, chimeric antibodies (e.g., human-mouse chimera), single-chain antibodies, intracellularly-made antibodies (i.e., intrabodies), and antigen-binding fragments thereof. The antibodies or antigen-binding fragments thereof can be of any type (e.g., IgG, IgE, IgM, IgD, IgA, and IgY), class (e.g., IgG1, IgG2, IgG3, IgG4, IgA1, and IgA2), or subclass. In some embodiments, the antibody or antigen-binding fragment thereof is an IgG antibody or antigen-binding fragment thereof.

[0480] In some embodiments, the antibodies or antigen-binding fragments thereof comprises an Fc region that can be originated from various types (e.g., IgG, IgE, IgM, IgD, IgA, and IgY), class (e.g., IgG1, IgG2, IgG3, IgG4, IgA1, and IgA2), or subclass. In some embodiments, the Fc region is originated from an IgG antibody or antigen-binding fragment thereof. The sequences and differences of the IgG subclasses are known in the art, and are described, e.g., in Vidarsson, et al., Frontiers in Immunology 5 (2014); Irani, et al., Molecular Immunology 67.2 (2015): 171-182; Shakib, Farouk, ed., The human IgG subclasses: molecular analysis of structure, function and regulation. Elsevier, 2016; each of which is incorporated herein by reference in its entirety.

[0481] The present disclosure also provides an antibody or antigen-binding fragment thereof that cross-competes with any antibody or antigen-binding fragment as described herein. The cross-competing assay is known in the art, and is described e.g., in Moore et al., Journal of Virology 70.3 (1996): 1863-1872, which is incorporated herein reference in its entirety. In one aspect, the present disclosure also provides an antibody or antigen-binding fragment thereof that binds to the same epitope or region as any antibody or antigen-binding fragment as described herein. The epitope binning assay is known in the art, and is described e.g., in Estep et al. MAbs. Vol. 5. No. 2. Taylor & Francis, 2013, which is incorporated herein reference in its entirety.

[0482] The CDRs are important for recognizing an epitope of an antigen. As used herein, an “epitope” is the smallest portion of a target molecule capable of being specifically bound by the antigen binding domain of an antibody. The minimal size of an epitope may be about three, four, five, six, or seven amino acids, but these amino acids need not be in a consecutive linear sequence of the antigen's primary structure, as the epitope may depend on an antigen's three-dimensional configuration based on the antigen's secondary and tertiary structure.

[0483] In some embodiments, the antibody or antigen-binding fragment thereof comprises an Fc region, e.g., as a llama immunoglobulin. In some embodiments, the antibody or antigen-binding fragment thereof does not comprise an Fc region, e.g., as a single-domain antibody. In some embodiments, the antibody or antigen-binding fragment thereof of the present disclosure can be modified in the Fc region to provide desired effector functions or serum half-life.

[0484] In some embodiments, the antibody or antigen-binding fragment thereof described herein is a multi-specific antibody. In some embodiments, the multi-specific antibody is a bi-specific antibody. Bi-specific antibodies can be made by engineering the interface between a pair of antibody molecules to maximize the percentage of heterodimers that are recovered from recombinant cell culture. For example, the interface can contain at least a part of the CH3 domain of an antibody constant domain. In this method, one or more small amino acid side chains from the interface of the first antibody molecule are replaced with larger side chains (e.g., tyrosine or tryptophan). Compensatory “cavities” of identical or similar size to the large side chain(s) are created on the interface of the second antibody molecule by replacing large amino acid side chains with smaller ones (e.g., alanine or threonine). This provides a mechanism for increasing the yield of the heterodimer over other unwanted end-products such as homodimers. This method is described, e.g., in WO 96/27011, which is incorporated by reference in its entirety.

[0485] In some embodiments, the Fc region is derived from human IgG1, human IgG2, human IgG3, or human IgG4. In some embodiments, the antibodies or antigen binding fragments do not have a functional Fc region. In some embodiments, the Fc region has LALA mutations (L234A and L235A mutations in EU numbering), or LALA-PG mutations (L234A, L235A, P329G mutations in EU numbering).

[0486] In some embodiments, the antibodies or antigen binding fragments can specifically inhibit tumor growth (e.g., hepatocellular carcinoma growth) and enhance APC (e.g., DC cell) function, for example, inducing surface expression of costimulatory and MHC molecules, inducing production of proinflammatory cytokines, and/or enhancing T cell triggering function.

[0487] In some embodiments, the antigen binding fragment can form a part of a chimeric antigen receptor (CAR). In some embodiments, the chimeric antigen receptor also comprises intracellular signaling domains from various costimulatory protein receptors (e.g., CD28, 4-1BB, ICOS). In some embodiments, the chimeric antigen receptor comprises multiple signaling domains, e.g., CD3z-CD28-4-1BB or CD3z-CD28-OX40, to increase potency. Thus, in one aspect, the disclosure further provides cells (e.g., T cells) that express the chimeric antigen receptors as described herein.

[0488] Fragments of antibodies are suitable for use in the methods provided so long as they retain the desired affinity and specificity of the full-length antibody. Thus, a fragment of an antibody that binds to a complex comprising an AFP peptide and an MHC molecule (e.g., AFP158/HLA-A*02:01) will retain an ability to bind to a complex comprising an AFP peptide and an MHC molecule (e.g., AFP158/HLA-A*02:01). An Fv fragment is an antibody fragment which contains a complete antigen recognition and binding site. This region consists of a dimer of one heavy and one light chain variable domain in tight association, which can be covalent in nature, for example in scFv. It is in this configuration that the three CDRs of each variable domain interact to define an antigen binding site on the surface of the VH-VL dimer. Collectively, the six CDRs or a subset thereof confer antigen binding specificity to the antibody. However, even a single variable domain (or half of an Fv comprising only three CDRs specific for an antigen) can have the ability to recognize and bind antigen, although usually at a lower affinity than the entire binding site.

[0489] Single-chain Fv or scFv antibody fragments comprise the VH and VL domains (or regions) of antibody, wherein these domains are present in a single polypeptide chain. Generally, the scFv polypeptide further comprises a polypeptide linker between the VH and VL domains, which enables the scFv to form the desired structure for antigen binding.

[0490] The Fab fragment contains a variable and constant domain of the light chain and a variable domain and the first constant domain (CH1) of the heavy chain. F(ab′)₂ antibody fragments comprise a pair of Fab fragments which are generally covalently linked near their carboxy termini by hinge cysteines between them. Other chemical couplings of antibody fragments are also known in the art.

[0491] Diabodies are small antibody fragments with two antigen-binding sites, which fragments comprise a VH connected to a VL in the same polypeptide chain (VH and VL). By using a linker that is too short to allow pairing between the two domains on the same chain, the domains are forced to pair with the complementary domains of another chain and create two antigen-binding sites.

[0492] Linear antibodies comprise a pair of tandem Fd segments (VH-CH1-VH-CH1) which, together with complementary light chain polypeptides, form a pair of antigen binding regions. Linear antibodies can be bispecific or monospecific.

[0493] Antibodies and antibody fragments of the present disclosure can be modified in the Fc region to provide desired effector functions or serum half-life.

[0494] Multimerization of antibodies may be accomplished through natural aggregation of antibodies or through chemical or recombinant linking techniques known in the art. For example, some percentage of purified antibody preparations (e.g., purified IgG₁ molecules) spontaneously form protein aggregates containing antibody homodimers and other higher-order antibody multimers.

[0495] Alternatively, antibody homodimers may be formed through chemical linkage techniques known in the art. For example, heterobifunctional crosslinking agents including, but not limited to SMCC (succinimidyl 4-(maleimidomethyl)cyclohexane-1-carboxylate) and SATA (N-succinimidyl S-acethylthio-acetate) can be used to form antibody multimers. An exemplary protocol for the formation of antibody homodimers is described in Ghetie et al. (Proc. Natl. Acad. Sci. U.S.A. 94: 7509-7514, 1997). Antibody homodimers can be converted to F(ab′)₂ homodimers through digestion with pepsin. Another way to form antibody homodimers is through the use of the autophilic T15 peptide described in Zhao et al. (J. Immunol. 25:396-404, 2002).

[0496] In some embodiments, the multi-specific antibody is a bi-specific antibody. Bi-specific antibodies can be made by engineering the interface between a pair of antibody molecules to maximize the percentage of heterodimers that are recovered from recombinant cell culture. For example, the interface can contain at least a part of the CH3 domain of an antibody constant domain. In this method, one or more small amino acid side chains from the interface of the first antibody molecule are replaced with larger side chains (e.g., tyrosine or tryptophan). Compensatory “cavities” of identical or similar size to the large side chain(s) are created on the interface of the second antibody molecule by replacing large amino acid side chains with smaller ones (e.g., alanine or threonine). This provides a mechanism for increasing the yield of the heterodimer over other unwanted end-products such as homodimers. This method is described, e.g., in WO 96/27011, which is incorporated by reference in its entirety.

[0497] Bi-specific antibodies include cross-linked or “heteroconjugate” antibodies. For example, one of the antibodies in the heteroconjugate can be coupled to avidin and the other to biotin. Heteroconjugate antibodies can also be made using any convenient cross-linking methods. Suitable cross-linking agents and cross-linking techniques are well known in the art and are disclosed in U.S. Pat. No. 4,676,980, which is incorporated herein by reference in its entirety. In some embodiments, the bispecific antibody is a bi-specific T-cell engager (BiTE). BiTEs are fusion proteins consisting of two single-chain variable fragments (scFvs) of different antibodies, or amino acid sequences from four different genes, on a single peptide chain of about 55 KD. One of the scFvs binds to T cells via the CD3 receptor, and the other to a tumor cell via a tumor specific molecule.

[0498] The disclosure also provides protein constructs (e.g., bi-specific T-cell engagers) that bind to a complex comprising an AFP peptide and an MHC molecule (e.g., AFP158/HLA-A*02:01). In some embodiments, the protein construct comprises: (1) a first functional moiety comprising any one of the antigen-binding fragment thereof described herein; and (2) a second functional moiety comprising a T-cell engaging molecule.

[0499] In some embodiments, the T-cell engaging molecule is an scFv targeting human CD3R. In some embodiments, the scFv is a commercially available antibody, e.g., OKT3 (from Janssen-Cilag). Any other suitable T cell engagers can be used in the protein constructs described herein. In some embodiments, the antigen-binding fragment specifically binds to a complex comprising a human AFP peptide and an MHC molecule. In some embodiments, the human AFP peptide has an amino acid sequence that is at least 80%, 85%, 90%, 95%, 96%, 97%, 98%, or 99% identical to the amino acid sequence of AFP158 (SEQ ID NO: 3).

[0500] In some embodiments, the first and second functional moieties of the protein constructs (e.g., bi-specific T-cell engagers) disclosed herein are connected via a linker. Any suitable linkers known in the art can be used to connect the first and second functional moieties of the protein constructs described herein. In some embodiments, the linker has an amino acid sequence of GGGGS (SEQ ID NO: 421) or GGGGSGGGGSGGGGS (SEQ ID NO: 422).

[0501] In some embodiments, the protein constructs (e.g., bi-specific T-cell engagers) described herein has an amino acid sequence that is at least 80%, 85%, 90%, 95%, 96%, 97%, 98%, or 99% identical to the amino acid sequence of any one of SEQ ID NOs: 297-300.

[0502] Also disclosed herein are protein constructs (e.g., half-life-extended bi-specific T-cell engagers) that bind to a complex comprising an AFP peptide and an MHC molecule (e.g., AFP158/HLA-A*02:01), comprising: (1) a first functional moiety comprising any one of the antibody or antigen-binding fragment thereof of described herein; and (2) a second functional moiety comprising a T-cell engaging molecule; and (3) a third functional moiety comprising a single chain human crystallizable fragment (Fc).

[0503] In some embodiments, the T-cell engaging molecule is an scFv targeting human CD3R. In some embodiments, the scFv is a humanized anti-CD3 scFv, e.g., humanized I2C scFv. Any other suitable T cell engagers can be used in the protein constructs described herein. In some embodiments, the antigen-binding fragment specifically binds to a complex comprising a human AFP peptide and an MHC molecule. In some embodiments, the human AFP peptide has an amino acid sequence that is at least 80%, 85%, 90%, 95%, 96%, 97%, 98%, or 99% identical to the amino acid sequence of AFP158 (SEQ ID NO: 3).

[0504] Human crystallizable fragments (Fc) suitable for use in the protein constructs described herein are known in the art. For example, Front. Immunol. 8:38, 2017 (doi: 10.3389/fimmu.2017.00038) describes Fc engineering for developing therapeutic bispecific antibodies and novel scaffolds.

[0505] In some embodiments, the first, second, and third functional moieties of the protein constructs (e.g., half-life-extended bi-specific T-cell engagers) disclosed herein are connected via a linker. Any suitable linkers known in the art can be used to connect the first, second, and third functional moieties of the protein constructs described herein. In some embodiments, the linker has an amino acid sequence of GGGGS (SEQ ID NO: 421) or GGGGSGGGGSGGGGS (SEQ ID NO: 422).

[0506] In some embodiments, the protein constructs (e.g., half-life extended bi-specific T-cell engagers) described herein has an amino acid sequence that is at least 80%, 85%, 90%, 95%, 96%, 97%, 98%, or 99% identical to the amino acid sequence of any one of SEQ ID NOs: 302-331.

[0507] Also disclosed herein are protein constructs (e.g., “knobs-into-holes” T-cell engaging bi-specific antibodies) that bind to a complex comprising an AFP peptide and an MHC molecule (e.g., AFP158/HLA-A*02:01), comprising: (1) a first heavy chain polypeptide comprising a VH; (2) a light chain polypeptide comparing a VL, where the VH of the first heavy chain polypeptide and the VL associate with each other and specially bind to CD3, (3) a second heavy chain polypeptide, comprising any one of the heavy chain single variable regions (V_{H}Hs) described herein.

[0508] In some embodiments, the antigen-binding fragment specifically binds to a complex comprising a human AFP peptide and an MHC molecule. In some embodiments, the human AFP peptide has an amino acid sequence that is at least 80%, 85%, 90%, 95%, 96%, 97%, 98%, or 99% identical to the amino acid sequence of AFP158 (SEQ ID NO: 3).

[0509] In some embodiments, the first heavy chain polypeptide further comprises a hinge region and at least one heavy chain constant region (CH). In some embodiments, the heavy chain constant region(s) comprises at least one mutation that reduces FcγR and complement binding. In some embodiments, the mutations comprises L234A and L235A; or T366S, L368A, and Y407V. In some embodiments, the first heavy chain polypeptide comprises an amino acid sequence that is at least 80%, 85%, 90%, 95%, 96%, 97%, 98%, or 99% identical to SEQ ID NO: 332.

[0510] In some embodiments, the light chain polypeptide further comprises a light chain constant region (CL). In some embodiments, the light chain polypeptide comprises an amino acid sequence that is at least 80%, 85%, 90%, 95%, 96%, 97%, 98%, or 99% identical to SEQ ID NO: 333.

[0511] In some embodiments, the second heavy chain polypeptide includes a single heavy chain single variable region (V_{H}H) described herein. In some embodiments, the second heavy chain polypeptide includes two, three, or four repeats of a heavy chain single variable region (V_{H}H) described herein. In some embodiments, the second heavy chain polypeptide includes two repeats of a heavy chain single variable region (V_{H}H) described herein.

[0512] In some embodiments, the protein constructs (e.g., “knobs-into-holes” T-cell engaging bi-specific antibodies) described herein has an amino sequence that is at least 80%, 85%, 90%, 95%, 96%, 97%, 98%, or 99% identical to SEQ ID NO:334 or SEQ ID NO: 335.

[0513] Any of the antibodies or antigen-binding fragments described herein may be conjugated to a stabilizing molecule (e.g., a molecule that increases the half-life of the antibody or antigen-binding fragment thereof in a subject or in solution). Non-limiting examples of stabilizing molecules include: a polymer (e.g., a polyethylene glycol) or a protein (e.g., serum albumin, such as human serum albumin). The conjugation of a stabilizing molecule can increase the half-life or extend the biological activity of an antibody or an antigen-binding fragment in vitro (e.g., in tissue culture or when stored as a pharmaceutical composition) or in vivo (e.g., in a human).

[0514] In some embodiments, the antibodies or antigen-binding fragments described herein can be conjugated to a therapeutic agent. The antibody-drug conjugate comprising the antibody or antigen-binding fragment thereof can covalently or non-covalently bind to a therapeutic agent. In some embodiments, the therapeutic agent is a cytotoxic or cytostatic agent (e.g., cytochalasin B, gramicidin D, ethidium bromide, emetine, mitomycin, etoposide, tenoposide, vincristine, vinblastine, colchicin, doxorubicin, daunorubicin, dihydroxy anthracin, maytansinoids such as DM-1 and DM-4, dione, mitoxantrone, mithramycin, actinomycin D, 1-dehydrotestosterone, glucocorticoids, procaine, tetracaine, lidocaine, propranolol, puromycin, epirubicin, and cyclophosphamide and analogs).

### Chimeric Antigen Receptors and Binding Molecules

[0515] Chimeric antigen receptors (CARs) combine many facets of normal T cell activation into a single protein. They link an extracellular antigen recognition domain to an intracellular signaling domain, which activates the T cell when an antigen is bound. CARs typically have the following regions: an antigen binding domain, an extracellular hinge region, a transmembrane region, and an intracellular region. In some embodiments, the intracellular region comprises an intracellular signaling domain or an intracellular signaling region.

[0516] The antigen binding domain is exposed to the outside of the cell, in the ectodomain portion of the receptor. It interacts with potential target molecules and is responsible for targeting the CAR-T cell to any cell expressing a matching molecule. The antigen binding domain is typically derived from the variable regions of a monoclonal antibody linked together as a single-chain variable fragment (scFv). An scFv is a chimeric protein made up of the light (VL) and heavy (VH) chains of immunoglobulins, connected with a short linker peptide. In some embodiments, the antigen binding domain comprises one or more (e.g., 1, 2, 3, 4, 5, or 6) heavy chain single variable domains (V_{H}Hs). In some embodiments, the V_{H}Hs are connected with a linker peptide (e.g., a flexible linker). The linker peptide between the two V_{H}Hs includes hydrophilic residues with stretches of glycine and serine in it for flexibility as well as stretches of glutamate and lysine for added solubility.

[0517] In some embodiments, the linker peptide comprises at least or about 5, 6, 7, 8, 9, 10, 11, 12, 13, 14, 15, 16, 17, 18, 19, 20, 30, 40, or 50 amino acid residues. In some embodiments, the linker peptide comprises at least or about 4, 5, 6, 7, 8, 9, 10, 11, 12, 13, 14, 15, 16, 20, 25, 30, or 40 glycine residues. In some embodiments, the linker peptide comprises at least or about 1, 2, 3, 4, 5, 6, 7, or 8 serine residues. In some embodiments, the linker peptide comprises or consists of both glycine and serine residues. In some embodiments, the linker peptide comprises or consists of a sequence that is at least or about 70%, at least or about 75%, at least or about 80%, at least or about 85%, at least or about 90%, at least or about 95%, at least or about 99%, or 100% identical to GGGGS (SEQ ID NO: 421) or GGGGSGGGGSGGGGS (SEQ ID NO: 422). In some embodiments, the linker sequence comprises at least 1, 2, 3, 4, 5, 6, 7, or 8 repeats of GGGGS (SEQ ID NO: 421). In some embodiments, the linker sequence has no more than 10, 11, 12, 13, 14, 15, 16, 17, 18, 19, 20, 30, 40, or 50 amino acid residues. In some embodiments, the linker peptide comprises 1, 2, 3, 4, or 5 amino acid insertions, deletions, or substitutions.

[0518] In some embodiments, the antigen binding domain specifically binds to an AFP/MHC complex (e.g., AFP158/HLA-A*02:01).

[0519] The hinge, also called a spacer, is a small structural domain that sits between the antigen binding domain and the cell's outer membrane. An ideal hinge enhances the flexibility of the scFv receptor head, reducing the spatial constraints between the CAR and its target antigen. This promotes antigen binding and synapse formation between the CAR-T cells and target cells. Hinge sequences are often based on membrane-proximal regions from immune molecules including e.g., IgG, CD8, and CD28.

[0520] The transmembrane region is a structural component, consisting of a hydrophobic alpha helix that spans the cell membrane. It anchors the CAR to the plasma membrane, bridging the extracellular hinge and antigen binding domains with the intracellular signaling domain. This domain is essential for the stability of the receptor as a whole. Generally, the transmembrane domain from the most membrane-proximal component of the endodomain is used, but different transmembrane domains result in different receptor stability. The CD28 transmembrane domain is known to result in a highly expressed, stable receptor.

[0521] The intracellular T cell signaling domain lies in the receptor's endodomain, inside the cell. After an antigen is bound to the external antigen binding domain, CAR receptors cluster together and transmit an activation signal. Then the internal cytoplasmic end of the receptor perpetuates signaling inside the T cell. Normal T cell activation relies on the phosphorylation of immunoreceptor tyrosine-based activation motifs (ITAMs) present in the cytoplasmic domain of CD3-zeta. To mimic this process, CD3-zeta's cytoplasmic domain is commonly used as the main CAR endodomain component. T cells also require co-stimulatory molecules in addition to CD3 signaling in order to persist after activation. For this reason, the endodomains of CAR receptors typically also include one or more chimeric domains from co-stimulatory proteins. Signaling domains from a wide variety of co-stimulatory molecules have been successfully tested, including CD28, CD27, CD134 (OX40), and CD137 (4-1BB).

[0522] Various CAR molecules and vectors expressing these CAR molecules can be used in the methods described herein. In some embodiments, the CAR molecules specifically binds to a tumor-associated antigen, e.g., AFP or a AFP/MHC complex. In some embodiments, the CAR comprises an antigen binding fragment as described herein. In some embodiments, the CAR comprises the amino acid sequence set forth in any of SEQ ID NO: 416, 417, 418, 419, 420; or an amino acid sequence that has at least 80%, 85%, 90%, 91%, 92%, 93%, 94%, 95%, 96%, 97%, 98%, or 99% sequence identity thereto.

[0523] Exemplary structure of antigen receptors, including the hinge, the transmembrane domain, and the intracellular T cell signaling domain, and methods for engineering and introducing such receptors into cells, are described, for example, in Chandran et al., Immunological reviews 290.1 (2019): 127-147; Cartellieri, Marc, et al., BioMed Research International 2010 (2010); and PCT publication No. WO2017173256A1; US2002/131960, US2013/287748, US2013/0149337, U.S. Pat. Nos. 6,451,995, 7,446,190, 8,252,592; each of which is incorporated herein by reference in its entirety.

[0524] The disclosure provides chimeric antigen receptors (CARs) or fragments thereof that specifically bind to a complex comprising an AFP peptide and an MHC molecule (e.g., AFP158/HLA-A*02:01). The CARs or fragments thereof described herein are capable of binding to a complex comprising an AFP peptide and an MHC molecule (e.g., AFP158/HLA-A*02:01).

[0525] The disclosure provides CARs or fragments thereof, comprising (a) an extracellular antigen-binding domain that specifically recognizes a complex comprising an AFP peptide and an MHC molecule (e.g., AFP158/HLA-A*02:01); (b) a transmembrane region; and (c) an intracellular signaling domain. In some embodiments, the antigen-binding domain includes a heavy chain variable domain (VH) and a light chain variable domain (VL). In some embodiments, the VH and VL of the CAR or fragments thereof described herein are identical to the VH and the VL of any one of the antibodies and antigen binding fragments in FIGS. 28A, 28B, 30A, 30B, and 30C (including e.g., antibodies AS170036, AS179723, AS179732, AS190259, AS148691, AS176934, AS176951, AS176992, AS177005, AS170030, and antibodies derived therefrom).

[0526] In some embodiments, the VH and the VL of the CAR or fragments described herein are identical to the VH and the VL of any one of the humanized antibodies or antigen binding fragments described herein (e.g., AS170036 VL1VH1, AS170036 VL2VH1, AS170036 VL1VH2, AS170036 VL2VH2, AS179723 VL1VH1, AS179723 VL1VH1g1, AS179723 VL1g1VH1, AS179723 VL1g1VH1g1, AS179723 VL1g1VH1g1-N73Y, AS179732 VL1VH1, AS179732 VL1VH1g1, AS179732 VL1g1VH1, AS179732 VL1g1VH1g1, AS179732 VL1g1VH1g1-N73Y, AS190259 VL1VH1, AS190259 VL1VH1g1, AS190259 VL2VH1, and AS190259 VL2VH1g1).

[0527] In some embodiments, the VH and the VL of the CAR or fragments described herein are identical to the VH and the VL of any one the humanized, affinity maturation mutant antibodies or antigen binding fragments (muteins) described herein (e.g., any one of the muteins disclosed in Tables 7-14).

[0528] In some embodiments, the antigen-binding domain includes a heavy chain single variable domain (V_{H}H). In some embodiments, the VH of the CAR or fragments thereof described herein are identical to the VH of any one of the V_{H}H antibodies and antigen binding fragments described herein (e.g., AS167821, and AS167830, and any antibodies derived therefrom).

[0529] In some embodiments, the VH and the VL of the CAR or fragments described herein are identical to the VH and the VL of a humanized, affinity maturation mutant antibody or antigen binding fragment (mutein) selected from AS170036 VL1VH1, AS179723 VL1g1VH1g1-N73Y, AS179732 VL1g1VH1g1-N73Y, AS190259 VL1VH1, AS170036 VL1VH1-VHG56Y, AS170036 VL1VH1-VHS57K, AS170036 VL1VH1-VHS57H, AS170036 VL1VH1-VHG108D, AS170036 VL1VH1-VHG108A, AS170036 VL1VH1-56N98I, AS170036 VL1VH1-57M98Q, AS170036 VL1VH1-56N108A, AS170036 VL1VH1-57K108S, AS170036 VL1VH1-98I108A, AS170036 VL1VH1-56Y98I108S, and AS170036 VL1VH1-56Y98Q108S.

[0530] In some embodiments, the VH and the VL of the CAR or fragments described herein are identical to the VH and the VL of an antibody or antigen binding fragment, or a humanized, affinity maturation mutant antibody or antigen binding fragment (mutein) selected from AS170036, AS179723, AS179732, AS148691, AS170036 VL1VH1, AS179723 VL1g1VH1g1-N73Y, AS179732 VL1g1VH1g1-N73Y, AS170036 VL1VH1-56Y98Q, AS170036 VL1VH1-56N98I, AS170036 VL1VH1-57K98F, AS170036 VL1VH1-57M98Q, AS170036 VL1VH1-56Y108A, AS170036 VL1VH1-56N108A, AS170036 VL1VH1-57H108A, AS170036 VL1VH1-57K108A, AS170036 VL1VH1-57K108S, AS170036 VL1VH1-98I108A, AS170036 VL1VH1-56Y98F108A, AS170036 VL1VH1-56Y98F108S, AS170036 VL1VH1-56Y98I108A, AS170036 VL1VH1-56Y98I108S, AS170036 VL1VH1-56Y98Q108S, AS170036 VL1VH1-56N98F108A, AS170036 VL1VH1-57K98F108A, AS170036 VL1VH1-57K98I108A, AS170036 VL1VH1-57K98Q108S, and AS170036 VL1VH1-57M98Q108A.

[0531] The VH, VH CDR sequences, VL, and VL CDR sequences of the antigen-binding domain (e.g., an scFv) for the CAR related antibody or antigen binding fragment thereof are summarized in FIGS. 28A, 28B, 30A, 30B, and 30C.

[0532] The CDR sequences of the antigen-binding domain (e.g., an scFv) for the CAR, related antibody or antigen binding fragment thereof include VH CDR1, VH CDR2, and VH CDR3, and VL CDR1, VL CDR2, and VL CDR3 comprising or consisting of the sequence of the VH CDR1, VH CDR2, and VH CDR3, and VL CDR1, VL CDR2, and VL CDR3 of any one of the antibody or antigen-binding fragments described herein.

[0533] In some embodiments, the antigen-binding fragment of the CAR comprises an scFv comprising an amino acid sequence having at least 90%, 91%, 93%, 94%, 95%, 96%, 97%, 98%, 99% or 100% sequence identity to any scFv sequences as described herein, including e.g., SEQ ID NOs: 75, 92, 109, 118, 135, 183, 185, 187, 189, 367, 376, 385, 394, 403, and 191-296.

[0534] In some embodiments, the antigen-binding fragment comprises a V_{H}H comprising an amino acid sequence having at least 90%, 91%, 93%, 94%, 95%, 96%, 97%, 98%, 99% or 100% sequence identity to any V_{H}H sequences as described herein, including e.g., SEQ ID NO: 152 or 160.

[0535] Furthermore, in some embodiments, the CAR, the related antibody or antigen binding fragment thereof described herein can also contain one, two, or three heavy chain variable region CDRs selected from FIGS. 28A, 28B, 30A, 30B, and 30C; and/or one, two, or three light chain variable region CDRs selected from FIGS. 28A, 28B, 30A, 30B, and 30C.

[0536] Furthermore, in some embodiments, the CAR, the related antibody or antigen binding fragment thereof described herein can also contain one, two, or three V_{H}H CDRs selected from FIG. 29.

[0537] In some embodiments, the CAR, the related antibody or antigen binding fragment thereof described herein can have a heavy chain variable region (VH) comprising complementarity determining regions (CDRs) 1, 2, 3, wherein the CDR1 region comprises or consists of an amino acid sequence that is at least 80%, 85%, 90%, or 95% identical to a selected VH CDR1 amino acid sequence, the CDR2 region comprises or consists of an amino acid sequence that is at least 80%, 85%, 90%, or 95% identical to a selected VH CDR2 amino acid sequence, and the CDR3 region comprises or consists of an amino acid sequence that is at least 80%, 85%, 90%, or 95% identical to a selected VH CDR3 amino acid sequence. In some embodiments, the CAR, the related antibody or antigen binding fragment thereof can have a light chain variable region (VL) comprising CDRs 1, 2, 3, wherein the CDR1 region comprises or consists of an amino acid sequence that is at least 80%, 85%, 90%, or 95% identical to a selected VL CDR1 amino acid sequence, the CDR2 region comprises or consists of an amino acid sequence that is at least 80%, 85%, 90%, or 95% identical to a selected VL CDR2 amino acid sequence, and the CDR3 region comprises or consists of an amino acid sequence that is at least 80%, 85%, 90%, or 95% identical to a selected VL CDR3 amino acid sequence. The selected VH CDRs 1, 2, 3 amino acid sequences and the selected VL CDRs, 1, 2, 3 amino acid sequences are shown in FIGS. 28A, 28B, 30A, 30B, and 30C.

[0538] In some embodiments, the CAR, the related antibody or antigen binding fragment thereof described herein contains a VH containing one, two, or three of the VH CDR1 of any one of the related antibodies or antigen-binding fragments thereof as described herein with zero, one or two amino acid insertions, deletions, or substitutions; VH CDR2 of any one of the related antibodies or antigen-binding fragments thereof as described herein with zero, one or two amino acid insertions, deletions, or substitutions; VH CDR3 of any one of the related antibodies or antigen-binding fragments thereof as described herein with zero, one or two amino acid insertions, deletions, or substitutions.

[0539] In some embodiments, the CAR, the related antibody or antigen binding fragment thereof described herein contains a VL containing one, two, or three of VL CDR1 of any one of the related antibodies or antigen-binding fragments thereof as described herein with zero, one or two amino acid insertions, deletions, or substitutions; VL CDR2 of any one of the related antibodies or antigen-binding fragments thereof as described herein with zero, one or two amino acid insertions, deletions, or substitutions; VL CDR3 of any one of the related antibodies or antigen-binding fragments thereof as described herein with zero, one or two amino acid insertions, deletions, or substitutions.

[0540] The insertions, deletions, and substitutions can be within the CDR sequence, or at one or both terminal ends of the CDR sequence. In some embodiments, the CDR is determined based on AbM numbering scheme.

[0541] The disclosure also provides CARs or fragments thereof that bind to an AFP/MHC complex. The CAR, related antibody or antigen binding fragment thereof contains a heavy chain variable region (VH) comprising or consisting of an amino acid sequence that is at least 80%, 85%, 90%, or 95% identical to a selected VH sequence, and a light chain variable region (VL) comprising or consisting of an amino acid sequence that is at least 80%, 85%, 90%, or 95% identical to a selected VL sequence. In some embodiments, the selected VH sequence is SEQ ID NO: 76, and the selected VL sequence is SEQ ID NO: 84. In some embodiments, the selected VH sequence is SEQ ID NO: 93, and the selected VL sequence is SEQ ID NO: 101. In some embodiments, the selected VH sequence is SEQ ID NO: 93, and the selected VL sequence is SEQ ID NO: 110. In some embodiments, the selected VH sequence is SEQ ID NO: 119, and the selected VL sequence is SEQ ID NO: 127. In some embodiments, the selected VH sequence is SEQ ID NO: 126, and the selected VL sequence is SEQ ID NO: 144. In some embodiments, the selected VH sequence is SEQ ID NO: 168, and the selected VL sequence is SEQ ID NO: 170. In some embodiments, the selected VH sequence is SEQ ID NO: 174, and the selected VL sequence is SEQ ID NO: 176. In some embodiments, the selected VH sequence is SEQ ID NO: 174, and the selected VL sequence is SEQ ID NO: 178. In some embodiments, the selected VH sequence is SEQ ID NO: 179, and the selected VL sequence is SEQ ID NO: 181. In some embodiments, the selected VH sequence is SEQ ID NO: 368, and the selected VL sequence is SEQ ID NO: 369. In some embodiments, the selected VH sequence is SEQ ID NO: 377, and the selected VL sequence is SEQ ID NO: 378. In some embodiments, the selected VH sequence is SEQ ID NO: 386, and the selected VL sequence is SEQ ID NO: 387. In some embodiments, the selected VH sequence is SEQ ID NO: 395, and the selected VL sequence is SEQ ID NO: 396. In some embodiments, the selected VH sequence is SEQ ID NO: 404, and the selected VL sequence is SEQ ID NO: 405. In some embodiments, the selected VH sequence is SEQ ID NO: 168 or 169, and the selected VL sequence is SEQ ID NO: 170 or 171. In some embodiments, the selected VH sequence is SEQ ID NO: 172, 173, or 174, and the selected VL sequence is SEQ ID NO: 175, 176, 177, or 178. In some embodiments, the selected VH sequence is SEQ ID NO: 179 or 180, and the selected VL sequence is SEQ ID NO: 181 or 182.

[0542] In some embodiments, the antigen-binding domain described herein comprises an scFv. In some embodiments, the VH and the VL described herein are joined by a flexible linker. In some embodiments, the flexible linker comprises an amino acid sequence of GGGGSGGGGSGGGGS (SEQ ID NO: 422). In some embodiments, the flexible linker comprises at least 1, 2, 3, 4, 5, or 6 repeats of GGGGS (SEQ ID NO: 421). In some embodiments, the flexible linker comprises 1, 2, 3, 4, or 5 amino acid insertions, deletions, or substitutions.

[0543] In some embodiments, the chimeric antigen receptors (CARs) or fragments thereof described herein comprises a hinge region. In some embodiments, the hinge region is a membrane-proximal region from CD8, and/or CD28, or an IgG hinge region, or any combination thereof. In some embodiments, the hinge region is a membrane-proximal region of CD8 (e.g., human CD8). In some embodiments, the hinge region is a fusion peptide comprising all or a portion of the membrane-proximal region of CD28 (e.g., human CD28) and all or a portion of the membrane-proximal region of CD8 (e.g., human CD8). In some embodiments, the hinge region comprises the membrane-proximal regions of both CD8 and CD28. In some embodiments, the hinge region comprises an amino acid sequence that is at least 80%, at least 85%, at least 90%, at least 95%, or 100% identical to SEQ ID NO: 424 or 426.

[0544] In some embodiments, the chimeric antigen receptors (CARs) or fragments thereof described herein comprises a transmembrane region. In some embodiments, the transmembrane domain is a transmembrane domain of 4-1BB/CD137, an alpha chain of a T cell receptor, a beta chain of a T cell receptor, CD3 epsilon, CD4, CD5, CD8, CD8 alpha, CD9, CD16, CD19, CD22, CD28, CD33, CD37, CD45, CD64, CD80, CD86, CD134, CD137, CD154, or a zeta chain of a T cell receptor, or any combination thereof. In some embodiments, the transmembrane region is a transmembrane region from CD8 (e.g., human CD8). In some embodiments, the transmembrane region comprises an amino acid sequence that is at least 80%, at least 85%, at least 90%, at least 95%, or 100% identical to SEQ ID NO: 425 or 427. In some embodiments, the hinge region and the transmembrane region are directly joined. In some embodiments, the joined hinge region and the transmembrane region comprises an amino acid sequence that is at least 80%, at least 85%, at least 90%, at least 95%, or 100% identical to SEQ ID NO: 423. In some embodiments, the transmembrane region is a fusion peptide comprising all or a portion of the transmembrane region of CD28 (e.g., human CD28) and all or a portion of the transmembrane region of CD8 (e.g., human CD8). In some embodiments, the transmembrane region comprises the transmembrane regions of both CD8 and CD28.

[0545] In some embodiments, the chimeric antigen receptors (CARs) or fragments thereof described herein comprises an intracellular signaling domain. In some embodiments, the intracellular signaling domain comprises an activating cytoplasmic signaling domain, which is capable of inducing a primary activation signal in an immune cell (e.g., a T cell). In some embodiments, the activating cytoplasmic signaling domain is a T cell receptor (TCR) component. In some embodiments, the activating cytoplasmic signaling domain comprises an immunoreceptor tyrosine-based activation motif (ITAM). In some embodiments, the intracellular signaling domain comprises an amino acid sequence derived from CD3 zeta, FcR gamma, FcR beta, CD3 gamma, CD3 delta, CD3 epsilon, CD5, CD22, CD79a, CD79b, CD278 (ICOS), FceRI, CD66d, DAP10, DAP12, or combinations thereof. In some embodiments, the intracellular signaling domain comprises a functional signaling domain of CD3 zeta (e.g., a human CD3 zeta). In some embodiments, the intracellular signaling domain comprises an amino acid sequence that is at least 80%, at least 85%, at least 90%, at least 95%, or 100% identical to SEQ ID NO: 431.

[0546] In some embodiments, the chimeric antigen receptors (CARs) or fragments thereof described herein comprises a costimulatory signaling domain. In some embodiments, the costimulatory signaling domain is between the transmembrane domain and the intracellular signaling domain. In some embodiments, the costimulatory signaling domain comprises a functional signaling domain from a protein selected from the group consisting of a MHC class I molecule, a TNF receptor protein, an Immunoglobulin-like protein, a cytokine receptor, an integrin, a signaling lymphocytic activation molecule (SLAM protein), an activating NK cell receptor, BTLA, a Toll ligand receptor, OX40, CD2, CD7, CD27, CD28, CD30, CD40, CDS, ICAM-1, LFA-1, CD11a/CD18, 4-1BB (CD137), B7-H3, CDS, ICAM-1, ICOS (CD278), GITR, BAFFR, LIGHT, HVEM (LIGHTR), KIRDS2, SLAMF7, NKp80 (KLRF1), NKp44, NKp30, NKp46, CD19, CD4, CD8alpha, CD8beta, IL2R beta, IL2R gamma, IL7R alpha, ITGA4, VLA1, CD49a, ITGA4, IA4, CD49D, ITGA6, VLA-6, CD49f, ITGAD, CD11d, ITGAE, CD103, ITGAL, CD11a, LFA-1, ITGAM, CD11b, ITGAX, CD11c, ITGB1, CD29, ITGB2, CD18, LFA-1, ITGB7, NKG2D, NKG2C, TNFR2, TRANCE/RANKL, DNAM1 (CD226), SLAMF4 (CD244, 2B4), CD84, CD96 (Tactile), CEACAM1, CRTAM, Ly9 (CD229), CD160 (BY55), PSGL1, CD100 (SEMA4D), CD69, SLAMF6 (NTB-A, Ly108), SLAM (SLAMF1, CD150, IPO-3), BLAME (SLAMF8), SELPLG (CD162), LTBR, LAT, GADS, SLP-76, PAG/Cbp, CD19a, and a CD83 ligand. In some embodiments, the costimulatory signaling domain comprises a functional signaling domain from OX40, CD28, 4-1BB, ICOS, or a signaling portion thereof. In some embodiments, the costimulatory signaling domain comprises an intracellular signaling domain of 4-1BB (e.g., human 4-1BB). In some embodiments, the costimulatory signaling domain comprises an intracellular signaling domain of CD28 (e.g., human CD28). In some embodiments, the costimulatory signaling domain comprises intracellular signaling domains of both CD28 (e.g., human CD28) and 4-1BB (e.g., human 4-1BB). In some embodiments, the costimulatory signaling domain is a fusion peptide comprising all or a portion of the intracellular signaling domain of CD28 (e.g., human CD28) and all or a portion of the intracellular signaling domain of 4-1BB (e.g., human 4-1BB). In some embodiments, the costimulatory signaling domain comprises an amino acid sequence that is at least 80%, at least 85%, at least 90%, at least 95%, or 100% identical to SEQ ID NO: 428, 429, or 430.

[0547] In some embodiments, the chimeric antigen receptor comprises an antigen binding domain and an amino acid sequence that is at least 80%, at least 85%, at least 90%, at least 95%, or 100% identical to SEQ ID NO: 413 or 415. In some embodiments, the chimeric antigen receptor further comprises a signal peptide.

[0548] In some embodiments, the chimeric antigen receptor comprises a Toll-like receptor 2 (TLR2) TIR domain. TLR2 is known to strengthen the effector function and proliferation of CD8⁺ T cells and reduce the activation threshold of costimulatory signaling. By adding TLR2 TIR domain to the 3′ end of CAR, the resulting CAR T cells can exhibit enhanced cytotoxicity and expansion capacity and lower expression levels of exhaustion markers.

[0549] In one aspect, the disclosure also provides a chimeric T cell receptor (cTCR) comprising the antigen binding fragments as described herein. The chimeric TCR (cTCR) can contain the TCRζ cytoplasmatic domain. This domain is capable of inducing a potent activation signal in the absence of the remaining components of TCR-CD3 complex, thus activating cytolytic functions. In some embodiments, the chimeric receptors containing the TCRζ chain and the CD8a hinge are not associated with endogenous subunits of the TCR complex. In some embodiments, the transmembrane domain is derived from the transmembrane domain of a TCR subunit selected from the group consisting of TCRα, TCRβ, TCRγ, TCRδ, CD3γ, CD3ε, and CD3δ. In some embodiments, the intracellular signaling domain is derived from the intracellular signaling domain of a TCR subunit selected from the group consisting of TCRα, TCRβ, TCRγ, TCRδ, CD3γ, CD3ε, and CD3δ.

Methods of Making Antibodies that Bind to an AFP/MHC Complex

[0550] A synthesized and purified AFP/MHC complex (e.g., AFP158/HLA-A*02:01 complex) and/or AFP158 peptide-loaded cells (e.g., T2/AFP158 cells) can be used as an immunogen to generate antibodies. Polyclonal antibodies can be raised in animals by multiple injections (e.g., subcutaneous or intraperitoneal injections) of an antigenic peptide or protein. In some embodiments, the antigenic peptide or protein is injected with at least one adjuvant. In some embodiments, the antigenic peptide or protein can be conjugated to an agent that is immunogenic in the species to be immunized. Animals can be injected with the antigenic peptide or protein more than one time (e.g., twice, three times, or four times).

[0551] In some embodiments, the antibodies described herein is generated using a biotinylated immunogen, e.g., a biotinylated AFP158/HLA-A*02:01 complex. In some embodiments, the immunogen used herein is an AFP158/HLA-A*02:01 complex generated by refolding peptide ligand AFP158 (SEQ ID NO: 3) with human β2M (SEQ ID NO: 1) and HLA-A*02:01 extracellular domain (ECD) fused with the Escherichia coli biotin holoenzyme synthetase (BirA) substrate peptide (BSP) (HLA-A*02:01 ECD-BSP, SEQ ID NO: 2).

[0552] An immunogen typically is used to prepare antibodies by immunizing a suitable subject (e.g., human, animals (e.g., camel, mouse), or transgenic animals expressing at least one human immunoglobulin locus). An appropriate immunogenic preparation can contain, for example, a recombinantly-expressed or a chemically-synthesized polypeptide (e.g., an AFP158/HLA-A*02:01 complex). The preparation can further include an adjuvant, such as Freund's complete or incomplete adjuvant, or a similar immunostimulatory agent.

[0553] Polyclonal antibodies can be prepared as described above by immunizing a suitable subject with an AFP158/HLA-A*02:01 complex, or an antigenic peptide thereof as an immunogen. The antibody titer in the immunized subject can be monitored over time by standard techniques, such as with an enzyme-linked immunosorbent assay (ELISA) using the immobilized biotinylated AFP158/HLA-A*02:01 complex. If desired, the antibody molecules can be isolated from the mammal (e.g., from the blood) and further purified by well-known techniques, such as protein A of protein G chromatography to obtain the IgG fraction. At an appropriate time after immunization, e.g., when the specific antibody titers are highest, antibody-producing cells can be obtained from the subject and used to prepare monoclonal antibodies by standard techniques, such as the hybridoma technique originally described by Kohler et al. (Nature 256:495-497, 1975), the human B cell hybridoma technique (Kozbor et al., Immunol. Today 4:72, 1983), the EBV-hybridoma technique (Cole et al., Monoclonal Antibodies and Cancer Therapy, Alan R. Liss, Inc., pp. 77-96, 1985), or trioma techniques. The technology for producing hybridomas is well known (see, generally, Current Protocols in Immunology, 1994, Coligan et al. (Eds.), John Wiley & Sons, Inc., New York, NY). Hybridoma cells producing a monoclonal antibody are detected by screening the hybridoma culture supernatants for antibodies that bind the polypeptide or epitope of interest, e.g., using a standard ELISA assay.

[0554] Variants of the antibodies or antigen-binding fragments described herein can be prepared by introducing appropriate nucleotide changes into the DNA encoding a human, humanized, or chimeric antibody, or antigen-binding fragment thereof described herein, or by peptide synthesis. Such variants include, for example, deletions, insertions, or substitutions of residues within the amino acids sequences that make-up the antigen-binding site of the antibody or an antigen-binding domain. In a population of such variants, some antibodies or antigen-binding fragments will have increased affinity for the target protein, e.g., a complex comprising an AFP peptide and an MHC molecule. Any combination of deletions, insertions, and/or combinations can be made to arrive at an antibody or antigen-binding fragment thereof that has increased binding affinity for the target. The amino acid changes introduced into the antibody or antigen-binding fragment can also alter or introduce new post-translational modifications into the antibody or antigen-binding fragment, such as changing (e.g., increasing or decreasing) the number of glycosylation sites, changing the type of glycosylation site (e.g., changing the amino acid sequence such that a different sugar is attached by enzymes present in a cell), or introducing new glycosylation sites.

[0555] Antibodies disclosed herein can be derived from any species of animal, including mammals. Non-limiting examples of native antibodies include antibodies derived from humans, primates (e.g., monkeys and apes), cows, pigs, horses, sheep, camelids (e.g., camels and llamas), chicken, goats, and rodents (e.g., rats, mice, hamsters and rabbits), including transgenic rodents genetically engineered to produce human antibodies. In some embodiments, the antibodies or antigen binding fragments thereof described herein is derived from camels.

[0556] Human and humanized antibodies include antibodies having variable and constant regions derived from (or having the same amino acid sequence as those derived from) human germline immunoglobulin sequences. Human antibodies may include amino acid residues not encoded by human germline immunoglobulin sequences (e.g., mutations introduced by random or site-specific mutagenesis in vitro or by somatic mutation in vivo), for example in the CDRs.

[0557] A humanized antibody, typically has a human framework (FR) grafted with non-human CDRs. Thus, a humanized antibody has one or more amino acid sequence introduced into it from a source which is non-human. These non-human amino acid residues are often referred to as “import” residues, which are typically taken from an “import” variable domain. Humanization can be essentially performed by e.g., substituting rodent CDRs or CDR sequences for the corresponding sequences of a human antibody. These methods are described in e.g., Jones et al., Nature, 321:522-525 (1986); Riechmann et al., Nature, 332:323-327 (1988); Verhoeyen et al., Science, 239:1534-1536 (1988); each of which is incorporated by reference herein in its entirety. Accordingly, “humanized” antibodies are chimeric antibodies wherein substantially less than an intact human V domain has been substituted by the corresponding sequence from a non-human species. In practice, humanized antibodies are typically non-human antibodies in which some CDR residues and some FR residues are substituted by residues from analogous sites in human antibodies.

[0558] The choice of human VH and VL domains to be used in making the humanized antibodies is very important for reducing immunogenicity. According to the so-called “best-fit” method, the sequence of the V domain of a mouse antibody is screened against the entire library of known human-domain sequences. The human sequence which is closest to that of the mouse is then accepted as the human FR for the humanized antibody (Sims et al., J. Immunol., 151:2296 (1993); Chothia et al., J. Mol. Biol., 196:901 (1987)).

[0559] It is further important that antibodies be humanized with retention of high specificity and affinity for the antigen and other favorable biological properties. To achieve this goal, humanized antibodies can be prepared by a process of analysis of the parental sequences and various conceptual humanized products using three-dimensional models of the parental and humanized sequences. Three-dimensional immunoglobulin models are commonly available and are familiar to those skilled in the art. Computer programs are available which illustrate and display probable three-dimensional conformational structures of selected candidate immunoglobulin sequences. Inspection of these displays permits analysis of the likely role of the residues in the functioning of the candidate immunoglobulin sequence, i.e., the analysis of residues that influence the ability of the candidate immunoglobulin to bind its antigen. In this way, FR residues can be selected and combined from the recipient and import sequences so that the desired antibody characteristic, such as increased affinity for the target antigen(s), is achieved.

[0560] Ordinarily, amino acid sequence variants of the human, humanized, or chimeric antibody that bind to an AFP/MHC complex (e.g., AFP158/HLA-A*02:01) will contain an amino acid sequence having at least 75%, 80%, 85%, 90%, 95%, 96%, 97%, 98%, or 99% percent identity with a sequence present in the light or heavy chain of the original antibody.

[0561] Identity or homology with respect to an original sequence is usually the percentage of amino acid residues present within the candidate sequence that are identical with a sequence present within the human, humanized, or chimeric antibody or fragment that binds to a complex comprising an AFP peptide and an MHC molecule (e.g., AFP158/HLA-A*02:01), after aligning the sequences and introducing gaps, if necessary, to achieve the maximum percent sequence identity, and not considering any conservative substitutions as part of the sequence identity.

[0562] Additional modifications to the antibodies or antigen-binding fragments that bind to a complex comprising an AFP peptide and an MHC molecule (e.g., AFP158/HLA-A*02:01) can be made. For example, a cysteine residue(s) can be introduced into the Fc region, thereby allowing interchain disulfide bond formation in this region. The homodimeric antibody thus generated may have any increased half-life in vitro and/or in vivo. Homodimeric antibodies with increased half-life in vitro and/or in vivo can also be prepared using heterobifunctional cross-linkers as described, for example, in Wolff et al. (Cancer Res. 53:2560-2565, 1993). Alternatively, an antibody can be engineered which has dual Fc regions (see, for example, Stevenson et al., Anti-Cancer Drug Design 3:219-230, 1989).

[0563] In some embodiments, a covalent modification can be made to the antibody or antigen-binding fragment thereof that bind to a complex comprising an AFP peptide and an MHC molecule (e.g., AFP158/HLA-A*02:01). These covalent modifications can be made by chemical or enzymatic synthesis, or by enzymatic or chemical cleavage. Other types of covalent modifications of the antibody or antibody fragment are introduced into the molecule by reacting targeted amino acid residues of the antibody or fragment with an organic derivatization agent that is capable of reacting with selected side chains or the N- or C-terminal residues.

[0564] In some embodiments, antibody variants are provided having a carbohydrate structure that lacks fucose attached (directly or indirectly) to an Fc region. For example, the amount of fucose in such antibody may be from 1% to 80%, from 1% to 65%, from 5% to 65% or from 20% to 40%. The amount of fucose is determined by calculating the average amount of fucose within the sugar chain at Asn297, relative to the sum of all glycostructures attached to Asn 297 (e.g. complex, hybrid and high mannose structures) as measured by MALDI-TOF mass spectrometry, as described in WO 2008/077546, for example. Asn297 refers to the asparagine residue located at about position 297 in the Fc region (Eu numbering of Fc region residues; or position 314 in Kabat numbering); however, Asn297 may also be located about ±3 amino acids upstream or downstream of position 297, i.e., between positions 294 and 300, due to minor sequence variations in antibodies. Such fucosylation variants may have improved ADCC function. In some embodiments, to reduce glycan heterogeneity, the Fc region of the antibody can be further engineered to replace the Asparagine at position 297 with Alanine (N297A).

[0565] In some embodiments, the constant region sequence can be mutated to include one or more knob-in-hole (KIH) mutations. In some embodies, one heavy chain can have either a S354C or a Y349C mutation. In some embodiments, the other heavy chain can have a T366W mutation. Many KIH mutations are known in art, and are described e.g., in U.S. Pat. Nos. 5,821,333 and 8,216,805, each of which is incorporated herein in its entirety. In certain embodiments, the knob-in-hole mutations are a T366Y mutation in a first domain, and a Y407T mutation in a second domain. In certain embodiments, the knob-in-hole mutations are a F405A in a first domain, and a T394W in a second domain. In certain embodiments, the knob-in-hole mutations are a T366Y mutation and a F405A in a first domain, and a T394W and a Y407T in a second domain. In certain embodiments, the knob-in-hole mutations are a T366W mutation in a first domain, and a Y407A in a second domain. In certain embodiments, the combined knob-in-hole mutations and engineered disulfide mutations are a S354C and T366W mutations in a first domain, and a Y349C, T366S, L368A, and a Y407V mutation in a second domain. In some embodiments, the knob-in-hole mutations are a T366W mutation in a first domain, and a T366S/L368A/Y407V mutation in a second domain.

### Recombinant Vectors

[0566] The present disclosure also provides recombinant vectors (e.g., an expression vectors) that include an isolated polynucleotide disclosed herein (e.g., a polynucleotide that encodes a polypeptide disclosed herein), host cells into which are introduced the recombinant vectors (i.e., such that the host cells contain the polynucleotide and/or a vector comprising the polynucleotide), and the production of recombinant polypeptides or fragments thereof by recombinant techniques.

[0567] A vector is a construct capable of delivering one or more polynucleotide(s) of interest to a host cell when the vector is introduced to the host cell. An “expression vector” is capable of delivering and expressing the one or more polynucleotide(s) of interest as an encoded polypeptide in a host cell into which the expression vector has been introduced. Thus, in an expression vector, the polynucleotide of interest is positioned for expression in the vector by being operably linked with regulatory elements such as a promoter, enhancer, and/or a poly-A tail, either within the vector or in the genome of the host cell at or near or flanking the integration site of the polynucleotide of interest such that the polynucleotide of interest will be translated in the host cell introduced with the expression vector.

[0568] A vector can be introduced into the host cell by methods known in the art, e.g., electroporation, chemical transfection (e.g., DEAE-dextran), transformation, transfection, and infection and/or transduction (e.g., with recombinant virus). Thus, non-limiting examples of vectors include viral vectors (which can be used to generate recombinant virus), naked DNA or RNA, plasmids, cosmids, phage vectors, and DNA or RNA expression vectors associated with cationic condensing agents.

[0569] The present disclosure provides a recombinant vector comprising a nucleic acid construct suitable for genetically modifying a cell, which can be used for treatment of pathological disease or condition. The present disclosure provides a recombinant vector comprising a nucleic acid construct suitable for expressing the CAR, the related antibodies or antigen binding fragments thereof.

[0570] Any vector or vector type can be used to deliver genetic material to the cell. These vectors include but are not limited to plasmid vectors, viral vectors, bacterial artificial chromosomes (BACs), yeast artificial chromosomes (YACs), and human artificial chromosomes (HACs). Viral vectors can include but are not limited to recombinant retroviral vectors, recombinant lentiviral vectors, recombinant adenoviral vectors, foamy virus vectors, recombinant adeno-associated viral (AAV) vectors, hybrid vectors, and plasmid transposons (e.g., sleeping beauty transposon system, and PiggyBac transposon system) or integrase based vector systems. Other vectors that are known in the art can also be used in connection with the methods described herein.

[0571] In some embodiments, the vector is a viral vector. The viral vector can be grown in a culture medium specific for viral vector manufacturing. Any suitable growth media and/or supplements for growing viral vectors can be used in accordance with the embodiments described herein. In some embodiments, the viral vector contains an EF1α promoter to facilitate expression. In some embodiments, the vector is a lentivirus vector.

[0572] In some embodiments, the vector used is a recombinant retroviral vector. A retroviral vector is capable of directing the expression of a nucleic acid molecule of interest. A retrovirus is present in the RNA form in its viral capsule and forms a double-stranded DNA intermediate when it replicates in the host cell. Similarly, retroviral vectors are present in both RNA and double-stranded DNA forms. The retroviral vector also includes the DNA form which contains a recombinant DNA fragment and the RNA form containing a recombinant RNA fragment. The vectors can include at least one transcriptional promoter/enhancer, or other elements which control gene expression. Such vectors can also include a packaging signal, long terminal repeats (LTRs) or portion thereof, and positive and negative strand primer binding sites appropriate to the retrovirus used. Long terminal repeats (LTRs) are identical sequences of DNA that repeat many times (e.g., hundreds or thousands of times) found at either end of retrotransposons or proviral DNA formed by reverse transcription of retroviral RNA. They are used by viruses to insert their genetic material into the host genomes. Optionally, the vectors can also include a signal which directs polyadenylation, selectable markers such as Ampicillin resistance, Neomycin resistance, TK, hygromycin resistance, phleomycin resistance histidinol resistance, or DHFR, as well as one or more restriction sites and a translation termination sequence. For example, such vectors can include a 5′ LTR, a leading sequence, a tRNA binding site, a packaging signal, an origin of second strand DNA synthesis, and a 3′ LTR or a portion thereof. Additionally, retroviral vector used herein can also refers to the recombinant vectors created by removal of the retroviral gag, pol, and env genes and replaced with the gene of interest.

[0573] In some embodiments, the vector or construct can contain a single promoter that drives the expression of one or more nucleic acid molecules. In some embodiments, such promoters can be multicistronic (bicistronic or tricistronic). For example, in some embodiments, transcription units can be engineered as a bicistronic unit containing an IRES (internal ribosome entry site), which allows coexpression of gene products (e.g. encoding CAR and an antibody or antigen binding fragment thereof) by a message from a single promoter. Alternatively, in some cases, a single promoter may direct expression of an RNA that contains, in a single open reading frame (ORF), two or three genes (e.g. encoding CAR and/or an antibody or antigen binding fragment thereof) separated from one another by sequences encoding a self-cleavage peptide (e.g., P2A or T2A) or a protease recognition site (e.g., furin). The ORF thus encodes a single polyprotein, which, either during (in the case of 2A e.g., T2A) or after translation, is cleaved into the individual proteins. In some cases, the peptide, such as T2A, can cause the ribosome to skip (ribosome skipping) synthesis of a peptide bond at the C-terminus of a 2A element, leading to separation between the end of the 2A sequence and the next peptide downstream.

[0574] Various cell lines can be used in connection with the vectors as described herein. Exemplary eukaryotic cells that may be used to express polypeptides include, but are not limited to, COS cells, including COS 7 cells; HEK293 cells, including HEK293-6E cells; CHO cells, including CHO-S, DG44. Lec13 CHO cells, and FUT8 CHO cells; PER.C6® cells; and NSO cells. In some embodiments, a particular eukaryotic host cell is selected based on its ability to make desired post-translational modifications to the antibodies or CAR molecule. For example, in some embodiments, CHO cells produce polypeptides that have a higher level of sialylation than the same polypeptide produced in HEK293 cells. In one aspect, the disclosure relates to a cell comprising the vector or the pair of vectors as described herein.

[0575] In some embodiments, provided herein are vectors encoding antibodies, CARs or fragments thereof. In some embodiments, the vectors comprise a nucleic acid sequence that is at least 90%, 91%, 92%, 93%, 94%, 95%, 96%, 97%, 98%, 99% or 100% identical to SEQ ID NO: 77, 94, 120, 137, 153, or 161. In some embodiments, the vectors comprise a nucleic acid sequence that is at least 90%, 91%, 92%, 93%, 94%, 95%, 96%, 97%, 98%, 99% or 100% identical to SEQ ID NO: 85, 102, 111, 128, or 145. In some embodiments, the vectors comprise a nucleic acid sequence that is at least 90%, 91%, 92%, 93%, 94%, 95%, 96%, 97%, 98%, 99% or 100% identical to SEQ ID NO: 184, 186, 188, or 190. In some embodiments, the vectors encode an amino acid sequence that is at least 90%, 91%, 92%, 93%, 94%, 95%, 96%, 97%, 98%, 99% or 100% identical to any sequence as described herein. In some embodiments, the sequence of the vectors are codon-optimized.

[0576] The present disclosure also provides a nucleic acid sequence comprising a nucleotide sequence encoding any of the antibodies, CAR, antigen binding fragments thereof, and/or CAR-derived binding molecules (including e.g., functional portions and functional variants thereof, polypeptides, or proteins described herein). “Nucleic acid” as used herein can include “polynucleotide,” “oligonucleotide,” and “nucleic acid molecule,” and generally means a polymer of DNA or RNA, which can be single-stranded or double-stranded, synthesized or obtained from natural sources, which can contain natural, non-natural or altered nucleotides. Furthermore, the nucleic acid comprises complementary DNA (cDNA). It is generally preferred that the nucleic acid does not comprise any insertions, deletions, inversions, and/or substitutions. However, it can be suitable in some instances, as discussed herein, for the nucleic acid to comprise one or more insertions, deletions, inversions, and/or substitutions.

[0577] The nucleic acids as described herein can be constructed based on chemical synthesis and/or enzymatic ligation reactions using procedures known in the art. For example, a nucleic acid can be chemically synthesized using naturally occurring nucleotides or variously modified nucleotides. In some of any such embodiments, the nucleotide sequence is codon-optimized.

[0578] The present disclosure also provides the nucleic acids comprising a nucleotide sequence complementary to the nucleotide sequence of any of the nucleic acids described herein or a nucleotide sequence which hybridizes under stringent conditions to the nucleotide sequence of any of the nucleic acids described herein.

[0579] In some embodiments, the nucleotide sequence encoding the CARs are separated by a peptide sequence that causes ribosome skipping. In some embodiments, the peptide that causes ribosome skipping is a P2A or T2A peptide. In some embodiments, the nucleic acid is synthetic. In some embodiments, the nucleic acid is cDNA.

[0580] In certain embodiments, the polypeptide comprises a signal peptide. In some embodiments, the signal peptide comprises a sequence that is at least at least 80%, at least 85%, at least 90%, at least 95%, or 100% identical to SEQ ID NO: 412 or 414.

[0581] In some embodiments, provided herein are polynucleotide (e.g., a vector) sequences encoding the CARs or fragments thereof described herein. In some embodiments, a CAR comprises a signal peptide (e.g., SEQ ID NO: 412 or 414) and a functional moiety (e.g., SEQ ID NO: 413 or 415), wherein one or more antigen binding domains as described herein are inserted between the signal peptide and the functional moiety.

[0582] The disclosure also provides a nucleic acid sequence that is at least 1%, 2%, 3%, 4%, 5%, 6%, 7%, 8%, 9%, 10%, 15%, 20%, 25%, 30%, 35%, 40%, 45%, 50%, 55%, 60%, 65%, 70%, 75%, 80%, 85%, 90%, 91%, 92%, 93%, 94%, 95%, 96%, 97%, 98%, 99% identical to any nucleotide sequence as described herein, and an amino acid sequence that is at least 1%, 2%, 3%, 4%, 5%, 6%, 7%, 8%, 9%, 10%, 15%, 20%, 25%, 30%, 35%, 40%, 45%, 50%, 55%, 60%, 65%, 70%, 75%, 80%, 85%, 90%, 91%, 92%, 93%, 94%, 95%, 96%, 97%, 98%, 99% identical to any amino acid sequence as described herein. In some embodiments, the disclosure relates to nucleotide sequences encoding any peptides that are described herein, or any amino acid sequences that are encoded by any nucleotide sequences as described herein.

[0583] In some embodiments, the nucleic acid sequence is at least or about 10, 20, 30, 40, 50, 60, 70, 80, 90, 100, 110, 120, 130, 150, 200, 250, 300, 350, 400, 500, or 600 nucleotides. In some embodiments, the amino acid sequence is at least or about 5, 6, 7, 8, 9, 10, 20, 30, 40, 50, 60, 70, 80, 90, 100, 110, 120, 130, 140, 150, 160, 170, 180, 190, 200, 300, 400, 500, 600, 700, 800, or 900 amino acid residues. In some embodiments, the nucleic acid sequence is less than 10, 20, 30, 40, 50, 60, 70, 80, 90, 100, 110, 120, 130, 150, 200, 250, 300, 350, 400, 500, or 600 nucleotides. In some embodiments, the amino acid sequence is less than 5, 6, 7, 8, 9, 10, 20, 30, 40, 50, 60, 70, 80, 90, 100, 110, 120, 130, 140, 150, 160, 170, 180, 190, 200, 300, 400, 500, 600, 700, 800, or 900 amino acid residues.

[0584] In some embodiments, the amino acid sequence (i) comprises an amino acid sequence; or (ii) consists of an amino acid sequence, wherein the amino acid sequence is any one of the sequences as described herein. In some embodiments, the nucleic acid sequence (i) comprises a nucleic acid sequence; or (ii) consists of a nucleic acid sequence, wherein the nucleic acid sequence is any one of the sequences as described herein.

[0585] To determine the percent identity of two amino acid sequences, or of two nucleic acid sequences, the sequences are aligned for optimal comparison purposes (e.g., gaps can be introduced in one or both of a first and a second amino acid or nucleic acid sequence for optimal alignment and non-homologous sequences can be disregarded for comparison purposes). The amino acid residues or nucleotides at corresponding amino acid positions or nucleotide positions are then compared. When a position in the first sequence is occupied by the same amino acid residue or nucleotide as the corresponding position in the second sequence, then the molecules are identical at that position. The percent identity between the two sequences is a function of the number of identical positions shared by the sequences, taking into account the number of gaps, and the length of each gap, which need to be introduced for optimal alignment of the two sequences. For purposes of illustration, the comparison of sequences and determination of percent identity between two sequences can be accomplished, e.g., using a Blossum 62 scoring matrix with a gap penalty of 12, a gap extend penalty of 4, and a frameshift gap penalty of 5.

### Engineered Cells

[0586] The present disclosure provides engineered cells (e.g., immune cells, T cells, NK cells, tumor-infiltrating lymphocytes) that express CAR, and/or various proteins as described herein. These engineered cells can be used to treat various disorders or disease as described herein (e.g., AFP-associated disorder or AFP-associated cancer).

[0587] In various embodiments, the cell that is engineered can be obtained from e.g., humans and non-human animals. In various embodiments, the cell that is engineered can be obtained from bacteria, fungi, humans, rats, mice, rabbits, monkeys, pig or any other species. Preferably, the cell is from humans, rats or mice. In some embodiments, the cells are mouse lymphocytes and engineered (e.g., transduced) to express the CAR, or antigen-binding fragment thereof. In some embodiments, the cell is obtained from humans. In various embodiments, the cell that is engineered is a blood cell. Preferably, the cell is a leukocyte (e.g., a T cell), lymphocyte or any other suitable blood cell type. In some embodiments, the cell is a peripheral blood cell. In some embodiments, the cell is a tumor-infiltrating lymphocyte (TIL). In some embodiments, the cell is a T cell, B cell or NK cell. In some embodiments, the cells are human peripheral blood mononuclear cells (PBMCs). In some embodiments, the human PBMCs are CD3+ cells. In some embodiments, the human PBMCs are CD8+ cells or CD4+ cells.

[0588] In some embodiments, the cell is a T cell. In some embodiments, the T cells can express a cell surface receptor that recognizes a specific antigenic moiety on the surface of a target cell. The cell surface receptor can be a wild type or recombinant T cell receptor (TCR), a chimeric antigen receptor (CAR), or any other surface receptor capable of recognizing an antigenic moiety that is associated with the target cell. T cells can be obtained by various methods known in the art, e.g., in vitro culture of T cells (e.g., tumor infiltrating lymphocytes) isolated from patients. Genetically modified T cells can be obtained by transducing T cells (e.g., isolated from the peripheral blood of patients), with a viral vector. In some embodiments, the T cells are CD4+ T cells, CD8⁺ T cells, or regulatory T cells. In some embodiments, the T cells are T helper type 1 T cells and T helper type 2 T cells. In some embodiments, the T cell expressing this receptor is an αβ-T cell. In alternate embodiments, the T cell expressing this receptor is a γδ-T cell. In some embodiments, the T cells are central memory T cells. In some embodiments, the T cells are effector memory T cells. In some embodiments, the T cells are naïve T cells.

[0589] In some embodiments, the cell is an NK cell. In some embodiments, preparation of the engineered cells includes one or more culture and/or preparation steps. The cells for introduction of the binding molecule, e.g., CAR, can be isolated from a sample, such as a biological sample, e.g., one obtained from or derived from a subject. In some embodiments, the subject from which the cell is isolated is one having the disease or condition or in need of a cell therapy or to which cell therapy will be administered. The subject in some embodiments is a human in need of a particular therapeutic intervention, such as the adoptive cell therapy for which cells are being isolated, processed, and/or engineered.

[0590] In some embodiments, the cells are stem cells, such as multipotent and pluripotent stem cells, including induced pluripotent stem cells (iPSCs). The cells can be primary cells, such as those isolated directly from a subject and/or isolated from a subject and frozen. In some embodiments, the stem cells are cultured with additional differentiation factors to obtain desired cell types (e.g., T cells).

[0591] Different cell types can be obtained from appropriate isolation methods. The isolation methods include the separation of different cell types based on the expression or presence in the cell of one or more specific molecules, such as surface markers, e.g., surface proteins, intracellular markers, or nucleic acid. In some embodiments, any known method for separation based on such markers can be used. In some embodiments, the separation is affinity- or immunoaffinity-based separation. For example, the isolation in some aspects includes separation of cells and cell populations based on the cells' expression or expression level of one or more markers, typically cell surface markers, for example, by incubation with an antibody or binding partner that specifically binds to such markers, followed generally by washing steps and separation of cells having bound the antibody or binding partner, from those cells having not bound to the antibody or binding partner.

[0592] Such separation steps can be based on positive selection, in which the cells having bound the reagents are retained for further use, and/or negative selection, in which the cells having not bound to the antibody or binding partner are retained. In some examples, both fractions are retained for further use. In some aspects, negative selection can be particularly useful where no antibody is available that specifically identifies a cell type in a heterogeneous population, such that separation is best carried out based on markers expressed by cells other than the desired population.

[0593] Also provided are methods, nucleic acids, compositions, and kits, for expressing the binding molecules, and for producing the genetically engineered cells expressing such binding molecules. The genetic engineering generally involves introduction of a nucleic acid encoding the therapeutic molecule, e.g. CAR, polypeptides, fusion proteins, into the cell, such as by retroviral transduction, transfection, or transformation. In some embodiments, gene transfer is accomplished by first stimulating the cell, such as by combining it with a stimulus that induces a response such as proliferation, survival, and/or activation, e.g., as measured by expression of a cytokine or activation marker, followed by transduction of the activated cells, and expansion in culture to numbers sufficient for clinical application.

[0594] In some embodiments, recombinant nucleic acids are transferred into cells using recombinant infectious virus particles, such as, e.g., vectors derived from simian virus 40 (SV40), adenoviruses, adeno-associated virus (AAV). In some embodiments, recombinant nucleic acids are transferred into T cells using recombinant lentiviral vectors or retroviral vectors, such as gamma-retroviral vectors. In some embodiments, the retroviral vector has a long terminal repeat sequence (LTR), e.g., a retroviral vector derived from the Moloney murine leukemia virus (MoMLV), myeloproliferative sarcoma virus (MPSV), murine embryonic stem cell virus (MESV), murine stem cell virus (MSCV), or spleen focus forming virus (SFFV). Most retroviral vectors are derived from murine retroviruses. In some embodiments, the retroviruses include those derived from any avian or mammalian cell source. The retroviruses typically are amphotropic, meaning that they are capable of infecting host cells of several species, including humans. In some embodiments, the vector is a lentivirus vector. In some embodiments, recombinant nucleic acids are transferred into T cells via electroporation. In some embodiments, recombinant nucleic acids are transferred into T cells via transposition. Other methods of introducing and expressing genetic material in immune cells include calcium phosphate transfection, protoplast fusion, cationic liposome-mediated transfection; tungsten particle-facilitated microparticle bombardment and strontium phosphate DNA co-precipitation. Many of these methods are descried e.g., in WO2019195486, which is incorporated herein by reference in its entirety. In some embodiments, the T cells are pre-activated, e.g., using anti-CD3/CD28 particles, for about 12 hours, about 24 hours, about 36 hours, about 48 hours, or about 60 hours prior to transduction. In some embodiments, the transduced T cells are harvested on day 5, day 6, day 7, day 8, day 9, day 10, day 11, or day 12 post transduction.

[0595] In some embodiments, the transfection efficiency of the virus-infected T cells described herein is at least 40%, at least 45%, at least 50%, at least 55%, at least 60%, at least 65%, at least 70%, at least 75%, or at least 80%. In some embodiments, the viability of the transduced T cells is at least 85%, at least 86%, at least 87%, at least 88%, at least 89%, at least 90%, at least 91%, at least 92%, at least 93%, at least 94%, or at least 95% on day 0, day 1, day 2, day 3, day 4, or day 5 post transduction. In some embodiments, the viability of the transduced T cells is at least or about 80%, at least or about 90%, at least or about 100%, at least or about 110%, at least or about 120% as compared to the viability of untransduced T cells, on day 0, day 1, day 2, day 3, day 4, or day 5 (e.g., on day 5) post transduction.

[0596] In some embodiments, the T cell expansion fold is at least 1 fold, 2 folds, 3 folds, 4 folds, 5 folds, 10 folds, 15 folds, 20 folds, 25 folds, 30 folds, 35 folds, 40 folds, 45 folds, or 50 folds, on day 0, day 1, day 2, day 3, day 4, or day 5 post transduction. In some embodiments, the T cell expansion fold of the transduced T cells is at least or about 50%, at least or about 60%, at least or about 70%, at least or about 80%, at least or about 90% as compared to that of untransduced T cells, on day 0, day 1, day 2, day 3, day 4, or day 5 (e.g., on day 5) post transduction. Also provided are populations of engineered cells, compositions containing such cells and/or enriched for such cells, such as in which cells expressing the CAR make up at least 15%, 20%, 25%, 30%, 35%, 40%, 50%, 60%, 70%, 80%, 90%, 91%, 92%, 93%, 94%, 95%, 96%, 97%, 98%, 99%, or more percent of the total cells in the composition or cells of a certain type such as T cells, CD8+ or CD4+ cells.

[0597] In some embodiments, the engineered cells (e.g., CAR-T cells) are co-cultured with target cells for at least or about 1 hour, 2 hours, 3 hours, 4 hours, 5 hours, 6 hours, 12 hours, 16 hours, 18 hours, 1 day, 2 days, 3 days, or longer, such that the engineered cells (e.g., CAR-T cells) can be activated.

[0598] In some embodiments, the cells are human PBMCs and engineered (e.g., transduced) to express the CAR, or antigen-binding fragment thereof.

[0599] Also provided are populations of engineered cells, compositions containing such cells and/or enriched for such cells, such as in which cells expressing the CAR make up at least 15%, 20%, 25%, 30%, 35%, 40%, 50%, 60%, 70%, 80%, 90%, 91%, 92%, 93%, 94%, 95%, 96%, 97%, 98%, 99%, or more percent of the total cells in the composition or cells of a certain type such as T cells, CD8+ or CD4+ cells.

[0600] In some embodiments, the target cells expresses AFP, e.g., HepG2/Luc cells. In some embodiments, the in vitro cytotoxicity of the engineered cells described herein (e.g., CAR-T cells) is determined. In some embodiments, the engineered cells are incubated with the target cells at an E:T ratio of about 5:1, about 4:1, about 3:1, about 2:1, about 1:1, about 0.9:1, about 0.8:1, about 0.7:1, about 0.6:1, about 0.5:1, about 0.4:1, about 0.3:1, about 0.2:1, or about 0.1:1. In some embodiments, the incubation is about 8 hours, about 10 hours, about 12 hours, about 14 hours, about 16 hours, about 20 hours, about 22 hours, about 24 hours, about 36 hours, or about 48 hours. In some embodiments, the calculated percentage of cytotoxicity (Cytotoxicity %) is at least 80%, at least 85%, or at least 90% when the engineered cells are incubated with Huh7 cells at an E:T ratio of 3:1. In some embodiments, the calculated percentage of cytotoxicity (Cytotoxicity %) is at least 20%, at least 30%, at least 40%, at least 50%, at least 60%, at least 70%, or at least 80%.

[0601] In some embodiments, the engineered cell involves a dual CAR. In a dual CAR approach, a cell is engineered to express two or more than two different CAR constructs. These different CAR constructs can target different antigens or different epitopes on the same antigens. In some embodiments, the cell can be transduced by a vector comprising nucleic acids encoding the two or more than two different CAR constructs.

[0602] In some embodiments, the engineered cell involves a split CAR. A split CAR involves a cell expressing a first CAR having a first antigen binding domain and a costimulatory domain (e.g., 4-1BB or CD28 costimulatory domain), and the cell also expresses a second CAR having a second antigen binding domain and an intracellular signaling domain (e.g., CD3 zeta). When the cell encounters the first antigen, the costimulatory domain is activated, and the cell proliferates. When the cell encounters the second antigen, the intracellular signaling domain is activated and cell-killing is activated. In some embodiments, the CAR-expressing cell is only fully activated in the presence of both antigens. In some embodiments, the cell is transduced by a vector comprising a sequence encoding the first CAR and the second CAR. The split CAR approach is described in more detail e.g., in WO2014/055442 and WO2014/055657, which are incorporated herein by reference in the entirety.

### Methods of Treatment

[0603] The methods disclosed herein can be used for various therapeutic purposes. In one aspect, the disclosure provides methods for treating a cancer in a subject, methods of reducing the rate of the increase of volume of a tumor in a subject over time, methods of reducing the risk of developing a metastasis, or methods of reducing the risk of developing an additional metastasis in a subject. In some embodiments, the treatment can halt, slow, retard, or inhibit progression of a cancer. In some embodiments, the treatment can result in the reduction of in the number, severity, and/or duration of one or more symptoms of the cancer in a subject.

[0604] In one aspect, the disclosure features methods that include administering a therapeutically effective amount of antibodies or antigen binding fragments thereof, or engineered cells expressing CAR, to a subject in need thereof (e.g., a subject having, or identified or diagnosed as having, a disease or disorder (e.g., cancer) related to the presence and/or expression level of an AFP peptide, e.g. AFP158). In some embodiments, the cancer is a liver cancer. In some embodiments, the liver cancer is a primary liver cancer. In some embodiments, the cancer is hepatocellular carcinoma (HCC). Other diseases or disorders related to the presence and/or expression level of an AFP peptide (e.g. AFP158) include, but are not limited to hepatocellular carcinoma (HCC), chronic hepatitis B virus (HBV) infection, chronic hepatitis C virus (HCV) infection, obesity, type II diabetes, and nonalcoholic fatty liver disease (NAFLD).

[0605] In some embodiments, the compositions and methods disclosed herein can be used for treatment of patients at risk for a cancer or an AFP associated disorder. Patients with cancer or an AFP associated disorder can be identified with various methods known in the art.

[0606] As used herein, by an “effective amount” is meant an amount or dosage sufficient to effect beneficial or desired results including halting, slowing, retarding, or inhibiting progression of a disease, e.g., a cancer. An effective amount will vary depending upon, e.g., an age and a body weight of a subject to which the therapeutic agent and/or therapeutic compositions is to be administered, a severity of symptoms and a route of administration, and thus administration can be determined on an individual basis.

[0607] As used herein, the term “delaying development of a disease” refers to defer, hinder, slow, retard, stabilize, suppress and/or postpone development of the disease (such as cancer). This delay can be of varying lengths of time, depending on the history of the disease and/or individual being treated. As is evident to one skilled in the art, a sufficient or significant delay can, in effect, encompass prevention, in that the individual does not develop the disease. For example, a late stage cancer, such as development of metastasis, can be delayed.

[0608] An effective amount can be administered in one or more administrations. By way of example, an effective amount of a composition is an amount sufficient to ameliorate, stop, stabilize, reverse, inhibit, slow and/or delay progression of a cancer in a patient or is an amount sufficient to ameliorate, stop, stabilize, reverse, slow and/or delay proliferation of a cell (e.g., a biopsied cell, any of the cancer cells described herein, or cell line (e.g., a cancer cell line)) in vitro. As is understood in the art, an effective may vary, depending on, inter alia, patient history as well as other factors such as the type (and/or dosage) of compositions used.

[0609] Effective amounts and schedules for administrations may be determined empirically, and making such determinations is within the skill in the art. Those skilled in the art will understand that the dosage that must be administered will vary depending on, for example, the mammal that will receive the treatment, the route of administration, the particular type of therapeutic agents and other drugs being administered to the mammal. Guidance in selecting appropriate doses can be found in the literature. In addition, a treatment does not necessarily result in the 100% or complete treatment or prevention of a disease or a condition. There are multiple treatment/prevention methods available with a varying degree of therapeutic effect which one of ordinary skill in the art recognizes as a potentially advantageous therapeutic mean.

[0610] In some aspects, the present disclosure also provides methods of diagnosing a disease/condition in a mammal, wherein the CARs, antibodies, or antigen binding fragments, interact with the sample(s) obtained from a subject to form a complex, wherein the sample can comprise one more cells, polypeptides, proteins, nucleic acids, antibodies, or antigen binding portions, blood, whole cells, lysates thereof, or a fraction of the whole cell lysates, e.g., a nuclear or cytoplasmic fraction, a whole protein fraction, or a nucleic acid fraction thereof, wherein the detection of the complex is the indicative of presence of a condition in the mammal, wherein the condition is cancer or infection. Further, the detection of the complex can be in any number of way known in the art but not limited to, ELISA, Flow cytometery, Fluorescence in situ hybridization (FISH), Polymerase chain reaction (PCR), microarray, southern blotting, electrophoresis, Phage analysis, chromatography and more. Thus, the treatment methods can further include determining whether a subject can benefit from a treatment as disclosed herein, e.g., by determining whether the subject has infection or cancer.

[0611] In any of the methods described herein, the engineered cells, optionally with at least one additional therapeutic agent, can be administered to the subject at least once a week (e.g., once a week, twice a week, three times a week, four times a week, once a day, twice a day, or three times a day). In some embodiments, at least two different engineered cells (e.g., cells expressing different CARs) are administered in the same composition (e.g., a liquid composition). In some embodiments, engineered cells and at least one additional therapeutic agent are administered in the same composition (e.g., a liquid composition). In some embodiments, engineered cells and at least one additional therapeutic agent are administered in two different compositions. In some embodiments, the at least one additional therapeutic agent is administered as a pill, tablet, or capsule. In some embodiments, the at least one additional therapeutic agent is administered in a sustained-release oral formulation. In some embodiments, the one or more additional therapeutic agents can be administered to the subject prior to, concurrently with, or after administering the engineered cells to the subject.

[0612] In some embodiments, the additional therapeutic agent can comprise one or more inhibitors selected from the group consisting of an inhibitor of B-Raf, an EGFR inhibitor, an inhibitor of a MEK, an inhibitor of ERK, an inhibitor of K-Ras, an inhibitor of c-Met, an inhibitor of anaplastic lymphoma kinase (ALK), an inhibitor of a phosphatidylinositol 3-kinase (PI3K), an inhibitor of an Akt, an inhibitor of mTOR, a dual PI3K/mTOR inhibitor, an inhibitor of Bruton's tyrosine kinase (BTK), and an inhibitor of Isocitrate dehydrogenase 1 (IDH1) and/or Isocitrate dehydrogenase 2 (IDH2). In some embodiments, the additional therapeutic agent is an inhibitor of indoleamine 2,3-dioxygenase-1) (IDO1) (e.g., epacadostat). In some embodiments, the additional therapeutic agent can comprise one or more inhibitors selected from the group consisting of an inhibitor of HER3, an inhibitor of LSD1, an inhibitor of MDM2, an inhibitor of BCL2, an inhibitor of CHK1, an inhibitor of activated hedgehog signaling pathway, and an agent that selectively degrades the estrogen receptor.

[0613] In some embodiments, the additional therapeutic agent can comprise one or more therapeutic agents selected from the group consisting of Trabectedin, nab-paclitaxel, Trebananib, Pazopanib, Cediranib, Palbociclib, everolimus, fluoropyrimidine, IFL, regorafenib, Reolysin, Alimta, Zykadia, Sutent, temsirolimus, axitinib, everolimus, sorafenib, Votrient, Pazopanib, IMA-901, AGS-003, cabozantinib, Vinflunine, an Hsp90 inhibitor, Ad-GM-CSF, Temozolomide, IL-2, IFNa, vinblastine, Thalomid, dacarbazine, cyclophosphamide, lenalidomide, azacytidine, lenalidomide, bortezomib, amrubicin, carfilzomib, pralatrexate, and enzastaurin.

[0614] In some embodiments, the additional therapeutic agent can comprise one or more therapeutic agents selected from the group consisting of an adjuvant, a TLR agonist, tumor necrosis factor (TNF) alpha, IL-1, HMGB1, an IL-10 antagonist, an IL-4 antagonist, an IL-13 antagonist, an IL-17 antagonist, an HVEM antagonist, an ICOS agonist, a treatment targeting CX₃CL1, a treatment targeting CXCL9, a treatment targeting CXCL10, a treatment targeting CCL5, an LFA-1 agonist, an ICAM1 agonist, and a Selectin agonist.

[0615] In some embodiments, carboplatin, nab-paclitaxel, paclitaxel, cisplatin, pemetrexed, gemcitabine, FOLFOX, or FOLFIRI are administered to the subject. In some embodiments, the additional therapeutic agent is selected from asparaginase, busulfan, carboplatin, cisplatin, daunorubicin, doxorubicin, fluorouracil, gemcitabine, hydroxyurea, methotrexate, paclitaxel, rituximab, vinblastine, vincristine and/or combinations thereof.

[0616] In some embodiments, the subject is not responsive to the treatments including e.g., resection, radiation, ablation, chemoembolization, liver transplantation, targeted drug therapy (Kinase inhibitors: Sorafenib, lenvatinib, Regorafenib, Cabozantinib) and some immune checkpoint inhibitors. In some embodiments, one or more of these treatments are administered to the subject in combination with the CAR, or the antibodyiesor antigen binding fragments thereof as described herein.

### Compositions and Formulations

[0617] The present disclosure provides compositions (including pharmaceutical and therapeutic compositions) containing the engineered cells and populations thereof, produced by the methods disclosed herein. Also provided are methods, e.g., therapeutic methods for administrating the engineered cells and compositions thereof to subjects, e.g., patients or animal models (e.g., mice).

[0618] Compositions including the engineered cells for administration, including pharmaceutical compositions and formulations, such as unit dose form compositions including the number of cells for administration in a given dose or fraction thereof are provided. The pharmaceutical compositions and formulations can include one or more optional pharmaceutically acceptable carrier or excipient. In some embodiments, the composition includes at least one additional therapeutic agent.

[0619] A pharmaceutically acceptable carrier refers to an ingredient in a pharmaceutical composition, other than an active ingredient. The pharmaceutically acceptable carrier does not interfere with the active ingredient and is nontoxic to a subject. A pharmaceutically acceptable carrier can include, but is not limited to, a buffer, excipient, stabilizer, or preservative. The pharmaceutical formulation refers to process in which different substances and/or agents are combined to produce a final medicinal product. The formulation studies involve developing a preparation of drug acceptable for patient. Additionally, a preparation which is in such form as to permit the biological activity of an active ingredient contained therein to be effective, and which contains no additional components which are unacceptably toxic to a subject to which the formulation would be administered.

[0620] In some embodiments, the choice of carrier is determined in part by the particular cell (e.g., T cell or NK cell) and/or by the method of administration. A variety of suitable formulations are available. For example, the pharmaceutical composition can contain preservatives. Suitable preservatives can include, for example, methylparaben, propylparaben, sodium benzoate, and benzalkonium chloride. In some embodiments, a mixture of two or more preservatives is used. The preservative or mixtures thereof are typically present in an amount of about 0.0001% to about 2% by weight of the total composition. Carriers are described, e.g., by Remington's Pharmaceutical Sciences 16th edition, Osol, A. Ed. (1980). Pharmaceutically acceptable carriers are generally nontoxic to recipients at the dosages and concentrations employed, and include, but are not limited to: buffers such as phosphate, citrate, and other organic acids; antioxidants including ascorbic acid and methionine; preservatives (such as octadecyldimethylbenzyl ammonium chloride; hexamethonium chloride; benzalkonium chloride; benzethonium chloride; phenol, butyl or benzyl alcohol; alkyl parabens such as methyl or propyl paraben; catechol; resorcinol; cyclohexanol; 3-pentanol; and m-cresol); low molecular weight (less than about 10 residues) polypeptides; proteins, such as serum albumin, gelatin, or immunoglobulins; hydrophilic polymers such as polyvinylpyrrolidone; amino acids such as glycine, glutamine, asparagine, histidine, arginine, or lysine; monosaccharides, disaccharides, and other carbohydrates including glucose, mannose, or dextrins; chelating agents such as EDTA; sugars such as sucrose, mannitol, trehalose or sorbitol; salt-forming counter-ions such as sodium; metal complexes (e.g. Zn-protein complexes); and/or non-ionic surfactants such as polyethylene glycol (PEG).

[0621] Suitable buffering agents include, for example, citric acid, sodium citrate, phosphoric acid, potassium phosphate, and various other acids and salts. In some embodiments, a mixture of two or more buffering agents is used. The buffering agent or mixtures thereof are typically present in an amount of about 0.001% to about 4% by weight of the total composition. Methods for preparing administrable pharmaceutical compositions are known. Exemplary methods are described in more detail in, for example, Remington: The Science and Practice of Pharmacy, Lippincott Williams & Wilkins; 21st ed. (May 1, 2005).

[0622] The formulations can include aqueous solutions. The formulation or composition can also contain more than one active ingredient useful for a particular indication, disease, or condition being treated with the engineered cells, preferably those with activities complementary to the cells, where the respective activities do not adversely affect one another. Such active ingredients are suitably present in combination in amounts that are effective for the purpose intended. Thus, in some embodiments, the pharmaceutical composition can further include other pharmaceutically active agents or drugs, such as checkpoint inhibitors, fusion proteins, chemotherapeutic agents, e.g., asparaginase, busulfan, carboplatin, cisplatin, daunorubicin, doxorubicin, fluorouracil, gemcitabine, hydroxyurea, methotrexate, paclitaxel, rituximab, vinblastine, and/or vincristine.

[0623] The pharmaceutical composition in some embodiments contains the cells in amounts effective to treat or prevent the disease or condition, such as a therapeutically effective or prophylactically effective amount. Therapeutic or prophylactic efficacy in some embodiments is monitored by periodic assessment of treated subjects. The desired dosage can be delivered by a single bolus administration of the cells, by multiple bolus administrations of the cells, or by continuous infusion administration of the cells.

[0624] The cells and compositions can be administered using standard administration techniques, formulations, and/or devices. Administration of the cells can be autologous or heterologous. For example, immunoresponsive T cells or progenitors can be obtained from one subject, and administered to the same subject or a different, compatible subject after genetically modifying them in accordance with various embodiments described herein. Peripheral blood derived immunoresponsive T cells or their progeny (e.g., in vivo, ex vivo or in vitro derived) can be administered via localized injection, including catheter administration, systemic injection, localized injection, intravenous injection, or parenteral administration. Usually, when administering a therapeutic composition (e.g., a pharmaceutical composition containing a genetically modified immunoresponsive cell), it is generally formulated in a unit dosage injectable form (solution, suspension, emulsion).

[0625] Formulations disclosed herein include those for oral, intravenous, intraperitoneal, subcutaneous, pulmonary, transdermal, intramuscular, intranasal, buccal, sublingual, or suppository administration. In some embodiments, the cell populations are administered parenterally. The term “parenteral,” as used herein, includes intravenous, intramuscular, subcutaneous, rectal, vaginal, and intraperitoneal administration. In some embodiments, the cells are administered to the subject using peripheral systemic delivery by intravenous, intraperitoneal, or subcutaneous injection.

[0626] Sterile injectable solutions can be prepared by incorporating the cells in a solvent, such as in admixture with a suitable carrier, diluent, or excipient such as sterile water, physiological saline, glucose, dextrose, or the like. The compositions can contain auxiliary substances such as wetting, dispersing, or emulsifying agents (e.g., methylcellulose), pH buffering agents, gelling or viscosity enhancing additives, preservatives, flavoring agents, and/or colors, depending upon the route of administration and the preparation desired. Standard texts can in some aspects be consulted to prepare suitable preparations.

[0627] Various additives which enhance the stability and sterility of the compositions, including antimicrobial preservatives, antioxidants, chelating agents, and buffers, can be added. Prevention of the action of microorganisms can be ensured by various antibacterial and antifungal agents, for example, parabens, chlorobutanol, phenol, and sorbic acid. Prolonged absorption of the injectable pharmaceutical form can be brought about by the use of agents delaying absorption, for example, aluminum monostearate and gelatin.

[0628] The formulations to be used for in vivo administration are generally sterile. Sterility can be readily accomplished, e.g., by filtration through sterile filtration membranes.

[0629] The compositions or pharmaceutical compositions as described herein can be included in a container, pack, or dispenser together with instructions for administration.

### Methods of Administration

[0630] Provided are also methods of administering the cells, populations, and compositions, and uses of such cells, populations, and compositions to treat or prevent diseases, conditions, and disorders, including cancers. In some embodiments, the methods described herein can reduce the risk of the developing diseases, conditions, and disorders as described herein.

[0631] In some embodiments, the cells, populations, and compositions, described herein are administered to a subject or patient having a particular disease or condition to be treated, e.g., via adoptive cell therapy, such as adoptive T cell therapy. In some embodiments, cells and compositions prepared by the provided methods, such as engineered compositions and end-of-production compositions following incubation and/or other processing steps, are administered to a subject, such as a subject having or at risk for the disease or condition. In some aspects, the methods thereby treat, e.g., ameliorate one or more symptom of, the disease or condition, such as by lessening tumor burden in cancer expressing an antigen recognized by the engineered T cells.

[0632] Methods for administration of cells for adoptive cell therapy are known and can be used in connection with the provided methods and compositions. For example, adoptive T cell therapy methods are described, e.g., in U.S. 2003/0170238; U.S. Pat. No. 4,690,915; Rosenberg, Nature reviews Clinical oncology 8.10 (2011): 577; Themeli et al., Nature biotechnology 31.10 (2013): 928; Tsukahara et al., Biochemical and biophysical research communications 438.1 (2013): 84-89; Davila et al., PloS one 8.4 (2013); each of which is incorporated herein by reference in its entirety.

[0633] In some embodiments, the cell therapy, e.g., adoptive T cell therapy, is carried out by autologous transfer, in which the T cells are isolated and/or otherwise prepared from the subject who is to receive the cell therapy, or from a sample derived from such a subject. Thus, in some aspects, the cells are derived from a subject, e.g., patient, in need of a treatment and the cells, following isolation and processing are administered to the same subject.

[0634] In some embodiments, the cell therapy, e.g., adoptive T cell therapy, is carried out by allogeneic transfer, in which the T cells are isolated and/or otherwise prepared from a subject other than a subject who is to receive or who ultimately receives the cell therapy, e.g., a first subject. In such embodiments, the cells then are administered to a different subject, e.g., a second subject, of the same species. In some embodiments, the first and second subjects are genetically identical. In some embodiments, the first and second subjects are genetically similar. In some embodiments, the second subject expresses the same HLA class or supertype as the first subject.

[0635] In some embodiments, the subject has been treated with a therapeutic agent targeting the disease or condition, e.g. the tumor, prior to administration of the cells or composition containing the cells. In some aspects, the subject is refractory or non-responsive to the other therapeutic agent. In some embodiments, the subject has persistent or relapsed disease, e.g., following treatment with another therapeutic intervention, including chemotherapy, radiation, and/or hematopoietic stem cell transplantation (HSCT), e.g., allogenic HSCT. In some embodiments, the administration effectively treats the subject despite the subject having become resistant to another therapy.

[0636] In some embodiments, the subject is responsive to the other therapeutic agent, and treatment with the therapeutic agent reduces disease burden. In some aspects, the subject is initially responsive to the therapeutic agent, but exhibits a relapse of the disease or condition over time. In some embodiments, the subject has not relapsed. In some such embodiments, the subject is determined to be at risk for relapse, such as at high risk of relapse, and thus the cells are administered prophylactically, e.g., to reduce the likelihood of or prevent relapse. In some embodiments, the subject has not received prior treatment with another therapeutic agent.

[0637] In some embodiments, the cells are administered at a desired dosage, which in some aspects includes a desired dose or number of cells or cell type(s) and/or a desired ratio of cell types. Thus, the dosage of cells in some embodiments is based on a total number of cells (or number per kg body weight) and a desired ratio of the individual populations or sub-types, such as the CD4+ to CD8+ ratio. In some embodiments, the dosage of cells is based on a desired total number (or number per kg of body weight) of cells in the individual populations or of individual cell types. In some embodiments, the dosage is based on a combination of such features, such as a desired number of total cells, desired ratio, and desired total number of cells in the individual populations.

[0638] In some embodiments, the populations or sub-types of cells, such as CD8+ and CD4+ T cells, are administered at or within a tolerated difference of a desired dose of total cells, such as a desired dose of T cells. In some embodiments, the desired dose is a desired number of cells or a desired number of cells per unit of body weight of the subject to whom the cells are administered, e.g., cells/kg. In some embodiments, the desired dose is at or above a minimum number of cells or minimum number of cells per unit of body weight. In some embodiments, among the total cells, administered at the desired dose, the individual populations or sub-types are present at or near a desired output ratio (such as CD4+ to CD8+ ratio), e.g., within a certain tolerated difference or error of such a ratio.

[0639] In some embodiments, the cells are administered at or within a tolerated difference of a desired dose of one or more of the individual populations or sub-types of cells, such as a desired dose of CD4+ cells and/or a desired dose of CD8+ cells. In some embodiments, the desired dose is a desired number of cells of the sub-type or population, or a desired number of such cells per unit of body weight of the subject to whom the cells are administered, e.g., cells/kg. In some embodiments, the desired dose is at or above a minimum number of cells of the population or sub-type, or minimum number of cells of the population or sub-type per unit of body weight.

[0640] Thus, in some embodiments, the dosage is based on a desired fixed dose of total cells and a desired ratio, and/or based on a desired fixed dose of one or more, e.g., each, of the individual sub-types or sub-populations. Thus, in some embodiments, the dosage is based on a desired fixed or minimum dose of T cells and a desired ratio of CD4+ to CD8+ cells, and/or is based on a desired fixed or minimum dose of CD4+ and/or CD8+ cells.

[0641] In certain embodiments, the cells or individual populations of sub-types of cells, are administered to the subject at a range of about one million to about 100 billion cells, such as, e.g., 1 million to about 50 billion cells (e.g., about 5 million cells, about 25 million cells, about 500 million cells, about 1 billion cells, about 5 billion cells, about 20 billion cells, about 30 billion cells, about 40 billion cells, or a range defined by any two of the foregoing values), such as about 10 million to about 100 billion cells (e.g., about 20 million cells, about 30 million cells, about 40 million cells, about 60 million cells, about 70 million cells, about 80 million cells, about 90 million cells, about 10 billion cells, about 25 billion cells, about 50 billion cells, about 75 billion cells, about 90 billion cells, or a range defined by any two of the foregoing values), and in some cases about 100 million cells to about 50 billion cells (e.g., about 120 million cells, about 250 million cells, about 350 million cells, about 450 million cells, about 650 million cells, about 800 million cells, about 900 million cells, about 3 billion cells, about 30 billion cells, about 45 billion cells) or any value in between these ranges.

[0642] In some embodiments, the dose of total cells and/or dose of individual sub-populations of cells is within a range of between at or about 10⁴ and at or about 10⁹ cells/kilograms (kg) body weight, such as between 10⁵ and 10⁶ cells/kg body weight, for example, at least or at least about or at or about 1×10⁵ cells/kg, 1.5×10⁵ cells/kg, 2×10⁵ cells/kg, or 1×10⁶ cells/kg body weight. For example, in some embodiments, the cells are administered at, or within a certain range of error of, between at or about 10⁴ and at or about 10⁹ T cells/kilograms (kg) body weight, such as between 10⁵ and 10⁶ T cells/kg body weight, for example, at least or at least about or at or about 1×10⁵ T cells/kg, 1.5×10⁵ T cells/kg, 2×10⁵ T cells/kg, or 1×10⁶ T cells/kg body weight.

[0643] In some embodiments, the cells are administered at or within a certain range of error of between at or about 10⁴ and at or about 10⁹ CD4+ and/or CD8+ cells/kilograms (kg) body weight, such as between 10⁵ and 10⁶ CD4+ and/or CD8+ cells/kg body weight, for example, at least or at least about or at or about 1×10⁵ CD4+ and/or CD8+ cells/kg, 1.5×10⁵ CD4+ and/or CD8+ cells/kg, 2×10⁵ CD4+ and/or CD8+ cells/kg, or 1×10⁶ CD4+ and/or CD8+ cells/kg body weight.

[0644] In some embodiments, the cells are administered at or within a certain range of error of, greater than, and/or at least about 1×10⁶, about 2.5×10⁶, about 5×10⁶, about 7.5×10⁶, or about 9×10⁶ CD4+ cells, and/or at least about 1×10⁶, about 2.5×10⁶, about 5×10⁶, about 7.5×10⁶, or about 9×10⁶ CD8+ cells, and/or at least about 1×10⁶, about 2.5×10⁶, about 5×10⁶, about 7.5×10⁶, or about 9×10⁶ T cells. In some embodiments, the cells are administered at or within a certain range of error of between about 10′ and 10¹² or between about 10¹⁰ and 10¹¹ T cells, between about 10′ and 10¹² or between about 10¹⁰ and 10¹¹ CD4+ cells, and/or between about 10′ and 10¹² or between about 10¹⁰ and 10¹¹ CD8+ cells.

[0645] In some embodiments, the cells are administered at or within a tolerated range of a desired output ratio of multiple cell populations or sub-types, such as CD4+ and CD8+ cells or sub-types. In some aspects, the desired ratio can be a specific ratio or can be a range of ratios. for example, in some embodiments, the desired ratio (e.g., ratio of CD4+ to CD8+ cells) is between at or about 1:5 and at or about 5:1 (or greater than about 1:5 and less than about 5:1), or between at or about 1:3 and at or about 3:1 (or greater than about 1:3 and less than about 3:1), such as between at or about 2:1 and at or about 1:5 (or greater than about 1:5 and less than about 2:1, such as at or about 5:1, 4.5:1, 4:1, 3.5:1, 3:1, 2.5:1, 2:1, 1.9:1, 1.8:1, 1.7:1, 1.6:1, 1.5:1, 1.4:1, 1.3:1, 1.2:1, 1.1:1, 1:1, 1:1.1, 1:1.2, 1:1.3, 1:1.4, 1:1.5, 1:1.6, 1:1.7, 1:1.8, 1:1.9:1:2, 1:2.5, 1:3, 1:3.5, 1:4, 1:4.5, or 1:5. In some aspects, the tolerated difference is within about 1%, about 2%, about 3%, about 4% about 5%, about 10%, about 15%, about 20%, about 25%, about 30%, about 35%, about 40%, about 45%, about 50% of the desired ratio, including any value in between these ranges. In some aspects, the CAR described here provides improved expression and activity, thereby providing therapeutic effects even at a low effector to target (E:T) ratio.

[0646] Optimal response to therapy can depend on the ability of the engineered recombinant receptors such as CARs, to be consistently and reliably expressed on the surface of the cells and/or bind the target antigen. For example, in some cases, properties of certain recombinant receptors, e.g., CARs, can affect the expression and/or activity of the recombinant receptor, in some cases when expressed in a cell, such as a human T cell, used in cell therapy. In some contexts, the level of expression of particular recombinant receptors, e.g., CARs, can be low, and activity of the engineered cells, such as human T cells, expressing such recombinant receptors, may be limited due to poor expression or poor signaling activity. In some cases, consistency and/or efficiency of expression of the recombinant receptor, and activity of the receptor is limited in certain cells or certain cell populations of available therapeutic approaches. In some cases, a large number of engineered T cells (a high effector to target (E:T) ratio) is required to exhibit functional activity. In some embodiments, the desired ratio (E:T ratio) is between at or about 1:10 and at or about 10:1 (or greater than about 1:10 and less than about 10:1), or between at or about 1:1 and at or about 10:1 (or greater than about 1:1 and less than about 5:1), such as between at or about 2:1 and at or about 10:1. In some embodiments, the E:T ratio is greater than or about 1:1, 2:1, 3:1, 4:1, 5:1, 6:1, 7:1, 8:1, 9:1, or 10:1. In some embodiments, the E:T ratio is about 3:1, about 1:1, or about 0.3:1.

[0647] For the prevention or treatment of disease, the appropriate dosage may depend on the type of disease to be treated, the type of cells or recombinant receptors, the severity and course of the disease, whether the cells are administered for preventive or therapeutic purposes, previous therapy, the subject's clinical history and response to the cells, and the discretion of the attending physician. The compositions and cells are in some embodiments suitably administered to the subject at one time or over a series of treatments.

[0648] The cells described herein can be administered by any suitable means, for example, by bolus infusion, by injection, e.g., intravenous or subcutaneous injections, intraocular injection, periocular injection, subretinal injection, intravitreal injection, trans-septal injection, subscleral injection, intrachoroidal injection, intracameral injection, subconjunctival injection, subconjunctival injection, sub-Tenon's injection, retrobulbar injection, peribulbar injection, or posterior juxtascleral delivery. In some embodiments, they are administered by parenteral, intrapulmonary, and intranasal, and, if desired for local treatment, intralesional administration. Parenteral infusions include intramuscular, intravenous, intraarterial, intraperitoneal, or subcutaneous administration. In some embodiments, a given dose is administered by a single bolus administration of the cells. In some embodiments, it is administered by multiple bolus administrations of the cells, for example, over a period of no more than 3 days, or by continuous infusion administration of the cells.

[0649] In some embodiments, the cells are administered as part of a combination treatment, such as simultaneously with or sequentially with, in any order, another therapeutic intervention, such as an antibody or engineered cell or receptor or agent, such as a cytotoxic or therapeutic agent. The cells in some embodiments are co-administered with one or more additional therapeutic agents or in connection with another therapeutic intervention, either simultaneously or sequentially in any order. In some contexts, the cells are co-administered with another therapy sufficiently close in time such that the cell populations enhance the effect of one or more additional therapeutic agents, or vice versa. In some embodiments, the cells are administered prior to the one or more additional therapeutic agents. In some embodiments, the cells are administered after the one or more additional therapeutic agents. In some embodiments, the one or more additional agents includes a cytokine, such as IL-2, for example, to enhance persistence. In some embodiments, the methods comprise administration of a chemotherapeutic agent.

[0650] Following administration of the cells, the biological activity of the engineered cell populations in some embodiments is measured, e.g., by any of a number of known methods. Parameters to assess include specific binding of engineered T cells to the antigen, in vivo, e.g., by imaging, or ex vivo, e.g., by ELISA or flow cytometry. In certain embodiments, the ability of the engineered cells to destroy target cells can be measured using any suitable method known in the art, such as cytotoxicity assays described in, for example, Kochenderfer et al., “Construction and pre-clinical evaluation of an anti-CD19 chimeric antigen receptor.” Journal of immunotherapy (Hagerstown, Md.: 1997) 32.7 (2009): 689 and Hermans et al., “The VITAL assay: a versatile fluorometric technique for assessing CTL- and NKT-mediated cytotoxicity against multiple targets in vitro and in vivo.” Journal of immunological methods 285.1 (2004): 25-40. In certain embodiments, the biological activity of the cells is measured by assaying expression and/or secretion of one or more cytokines, such as CD107a, IFNγ, IL-2, and TNF. In some aspects the biological activity is measured by assessing clinical outcome, such as reduction in tumor burden or load.

[0651] Repeated dosing methods are provided in which a first dose of cells is given followed by one or more second consecutive doses. The timing and size of the multiple doses of cells generally are designed to increase the efficacy and/or activity and/or function of engineered cells as described herein, when administered to a subject in adoptive therapy methods. The methods involve administering a first dose, generally followed by one or more consecutive doses, with particular time frames between the different doses.

[0652] In the context of adoptive cell therapy, administration of a given “dose” encompasses administration of the given amount or number of cells as a single composition and/or single uninterrupted administration, e.g., as a single injection or continuous infusion, and also encompasses administration of the given amount or number of cells as a split dose, provided in multiple individual compositions or infusions, over a specified period of time (e.g., no more than 3 days). Thus, in some contexts, the first or consecutive dose is a single or continuous administration of the specified number of cells, given or initiated at a single point in time. In some contexts, however, the first or consecutive dose is administered in multiple injections or infusions over a limited time period (e.g., no more than three days), such as once a day for three days or for two days or by multiple infusions over a single day period.

[0653] The cells of the first dose are administered in a single pharmaceutical composition. In some embodiments, the cells of the consecutive dose are administered in a single pharmaceutical composition.

[0654] In some embodiments, the cells of the first dose are administered in a plurality of compositions, collectively containing the cells of the first dose. In some embodiments, the cells of the consecutive dose are administered in a plurality of compositions, collectively containing the cells of the consecutive dose. In some aspects, additional consecutive doses can be administered in a plurality of compositions over a period of no more than 3 days.

[0655] In some embodiments, multiple consecutive doses are given, in some aspects using the same timing guidelines as those with respect to the timing between the first dose and first consecutive dose, e.g., by administering a first and multiple consecutive doses.

[0656] In some embodiments, the timing between the first dose and first consecutive dose, or a first and multiple consecutive doses, is such that each consecutive dose is given within a period of time is greater than about 5 days, 6 days, 7 days, 8 days, 9 days, 10 days, 11 days, 12 days, 13 days, 14 days, 15 days, 16 days, 17 days, 18 days, 19 days, 20 days, 21 days, 22 days, 23 days, 24 days, 25 days, 26 days, 27 days, 28 days or more. In some embodiments, the consecutive dose is given within a time period that is less than about 28 days after the administration of the first or immediately prior dose. The additional multiple additional consecutive dose or doses also are referred to as subsequent dose or subsequent consecutive dose.

[0657] The size of the first and/or one or more consecutive doses of cells are generally designed to provide improved efficacy and/or reduced risk of toxicity. In some aspects, a dosage amount or size of a first dose or any consecutive dose is any dosage or amount as described above. In some embodiments, the number of cells in the first dose or in any consecutive dose is between about 0.5×10⁶ cells/kg body weight of the subject and 5×10⁶ cells/kg, between about 0.75×10⁶ cells/kg and 3×10⁶ cells/kg or between about 1×10⁶ cells/kg and 2×10⁶ cells/kg.

[0658] As used herein, “first dose” is used to describe the timing of a given dose being prior to the administration of a consecutive or subsequent dose. The term does not necessarily imply that the subject has never before received a dose of cell therapy or even that the subject has not before received a dose of the same cells or cells expressing the same recombinant receptor or targeting the same antigen.

[0659] In some embodiments, multiple doses can be administered to a subject over an extended period of time (e.g., over a period of at least 1 week, 2 weeks, 3 weeks, 1 month, 2 months, 3 months, 4 months, 5 months, 6 months, 7 months, 8 months, 9 months, 10 months, 11 months, 12 months, 1 year, 2 years, 3 years, 4 years, or 5 years). A skilled medical professional may determine the length of the treatment period using any of the methods described herein for diagnosing or following the effectiveness of treatment (e.g., the observation of at least one symptom of cancer).

### EXAMPLES

[0660] The examples provided below are for purposes of illustration only, and are not intended to be limiting unless otherwise specified. Thus, the disclosure should in no way be construed as being limited to the following examples, but rather, should be construed to encompass any and all variations which become evident as a result of the teaching provided herein.

### Example 1. Production of Biotinylated AFP158/HLA-A*02:01 Complex

[0661] Biotinylated AFP158/HLA-A*02:01 complex were prepared. In brief, DNA encoding full-length human β-2 microglobulin (β2M) (SEQ ID NO: 1) was synthesized and cloned into vector pET-28a(+). The BirA substrate peptide (BSP) was added to the C-terminus of HLA-A*02:01 extracellular domain (ECD). DNA encoding HLA-A*02:01 ECD-BSP (SEQ ID NO: 2) was also synthesized and cloned into vector pET-28a(+). The vectors expressing human 02M and HLA-A*02:01 ECD-BSP were transformed into E. coli BL21 (DE3) cells separately, and isolated as inclusion bodies from bacteria culture. Peptide ligand AFP158 (SEQ ID NO: 3) refolded with human 02M and HLA-A*02:01 ECD-BSP to form AFP158/HLA-A*02:01 complex. The 02M can stabilize the peptide binding groove located in a chain. Folded peptide/HLA-A*02:01 complex were concentrated by ultrafiltration and further purified through size-exclusion chromatography (Superdex 200 10/300 GL). The peak corresponding to the properly folded MHC complex was concentrated and desalted with PD-10 desalting column. The AFP158/HLA-A*02:01 complex purity was further determined by SDS-PAGE and size-exclusion chromatography (TSKgel G3000SWx). HLA-A*02:01 and 02M subunits were observed as the major bands on the gel (FIG. 1). The peak corresponding to the properly folded AFP158/HLA-A*02:01 was observed at 14.366 min (FIG. 2). Peptide/HLA-A*02:01 complex were either aliquoted and frozen at −80° C. or biotinylated via BirA-mediated enzymatic reaction (Avidity, Cat: BirA500) according to the manufacturer's instruction.

### Example 2. Animal Immunization and Library Construction

### Animal Immunization

[0662] One camel was immunized with AFP158/HLA-A*02:01 complex and AFP158 peptide-loaded T2 cells (T2/AFP158 cells) under all current animal welfare regulations. For immunization, the AFP158/HLA-A*02:01 complex was formulated as an emulsion with CFA (primary immunization) or IFA (boost immunizations). The antigen was administered by double-spot injections intramuscularly at the neck. The animal received primary injection of the emulsion, containing 200 μg of AFP158/HLA-A*02:01 complex and 2 subsequent boost injections containing 100 μg of AFP158/HLA-A*02:01 complex at two weeks intervals. Then the animal receive 2 subsequent injections containing 1×10⁷ T2/AFP158 cells at weekly intervals. Two weeks later the animal received 3 subsequent boost injections containing 100 μg of AFP158/HLA-A*02:01 complex at weekly. At different time points during immunization, 10 ml blood samples were collected from the animal and sera were prepared. Conventional IgG (IgG1) and heavy chain antibodies (HCAbs, IgG2 and IgG3) were fractioned from pre-immune and immunized sera. The AFP158/HLA-A*02:01 complex specific humoral immune response was verified using the fractioned IgG1, IgG2 and IgG3 in an enzyme-linked immune sorbent assay (ELISA)-based experiment with immobilized biotinylated AFP158/HLA-A*02:01 complex produced in house.

[0663] The immune response of the eighth immunization was high (FIG. 3). Seven days afterwards, 100 ml blood sample was collected from the camel (terminal bleed). About 1×10⁸ peripheral blood lymphocytes (PBLs), as the genetic source of the conventional and heavy chain immunoglobulins, were isolated from the blood. The maximal diversity of antibodies is expected to be equal to the number of B-lymphocytes, which is about 10% of total PBLs. The fraction of HCAb-producing B-lymphocytes in a camel is about 20% of total B-lymphocytes. Therefore, the maximal diversity of HCAbs in the blood sample is estimated to be approximately 2×10⁶, and IgG1 is estimated to be 8×10⁶.

[0664] Phage display library construction Total RNA was extracted from lymphocytes of the immunized camel using TRIZOL® Reagent. cDNA was synthesized based on RNA template using PRIMESCRIPT™ 1^{st} Strand cDNA Synthesis Kit with an oligo(dT)20 primer. For construction of scFv phage display library, VHs and VLs were amplified from camel cDNA, purified and ligated in an in house phagemid vector. The ligation product was used to transform SS320 electrocompetent cells. The resulting library was supplemented with 20% glycerol and stored at −80° C.

[0665] The size of the sdAb library is estimated to be 3.8×10⁹. More than 100 randomly picked clones were sequenced. The insert rate, i.e. the percentage of clones with sdAb inserts, was 99.3%. The in-frame rate, i.e. the percentage of clones with sdAb DNA inserted that could be correctly translated into a sdAb amino acid sequence, was 99.1%.

[0666] The size of the scFv library is estimated to be 1.09×10¹⁰. More than 100 randomly picked clones were sequenced. The insert rate, i.e. the percentage of clones with scFv inserts, was 97.2%. The in-frame rate, i.e. the percentage of clones with scFv DNA inserted that could be correctly translated into a scFv amino acid sequence, was 91.0%.

### Example 3. Selection and Characterization of AFP158-Specific Phage Clones

### Selection of AFP158-Specific Phage Clones

[0667] Both immunized sdAb, scFv library and synthetic human Fab phage library were rescued and stored after filter sterilization at 4° C. for further use. Binders were isolated with the above-mentioned phage libraries against AFP158/HLA-A*02:01. In order to reduce the conformational change of MHCI complex onto plastic surfaces, solution panning was used in place of conventional plate panning. In solution panning, biotinylated AFP158/HLA-A*02:01 complex (Bio-AFP158) were first captured by streptavidin-conjugated Dyna-beads M-280, then mixed with depleted immunized sdAb/scFv library or synthetic human Fab phage library. Biotinylated control peptide/HLA-A*02:01 (Bio-controls) and T2 cells loaded with control peptides were used for depletion. The bound clones were isolated using a magnetic rack and eluted off the magnetic beads with TEA (Triethylamine). At least one round of panning was carried until the percentage of AFP158/HLA-A*02:01 specific phage clones reached 30%.

### Phage Supernatant Reactivity to AFP158 Peptide

[0668] Streptavidin ELISA plates were coated with biotinylated AFP158/HLA-A*02:01 complex (Bio-AFP158) or biotinylated control peptide/HLA-A*02:01 complex (Bio-control), respectively. Individual phage clones from enriched phage display panning pools against AFP158/HLA-A*02:01 complex were incubated in coated plates. Binding of the phage clones was detected by HRP-conjugated anti-M13 antibodies and developed using HRP substrate. The absorbance was read at 450 nm. All phage ELISA positive clones were sequenced. The redundant sequences were removed. Overall, 320 unique positive clones were identified through ELISA screening of 8012 phage clones enriched from phage panning. Specific and unique clones were further tested for their binding to HLA-A2/peptide complexes on live cell surfaces by flow cytometry (FACS analysis) using AFP158-loaded live T2 cells. T2 cells loaded with AFP158 and a control peptide (SEQ ID NO: 16) were stained with sdAb, scFv or Fab phage clones supernatant, followed by staining with anti-Fd Alexa Flour 647. Each step of the staining was done for 30 minutes on ice and the cells were washed three times between staining. Among the 320 clones, 241 recognize AFP158-loaded T2 cells specifically, but not the control peptide-loaded T2 cells.

### Phage Supernatant Cross-Reactivity to AFP158 Homologous Peptides

[0669] Based on the search on iCrossR web-server, 12 peptides (SEQ ID NOs: 4-15, Table 4) were identified from human proteome to have high sequence homology to AFP158 (henceforth called homologous peptides). The overall sequence identity of these peptides to AFP158 is at least 55% (e.g. at least 5 of 9 residues are identical). The T cell epitope sequence identity (P3-P8) is at least 66% (e.g. at least 4 of 6 residues are identical) (Table 4). Flow cytometry was carried out to test the interaction between 241 phage clones from high-throughput phage screening and T2 cells loaded with AFP158 and 12 homologous peptides. Among the 241 phage clones, 136 shows no or low reactivity to 12 homologous peptides (data not shown).

TABLE 4
Twelve Homologous Peptides Identified From Human Proteome

| | | Cleavage | TAP | MHC Score | Combined | Identity |
|---|---|---|---|---|---|---|
| Gene Name | Epitope | Score | Score | (HLA-A0201: nM) | Score | (P3-P8) |
| AFP | FMNKFIYEI | 4.01E−2 | 6.252E−1 | HLA-A0201: 3 | 2.138E−2 | 100% |
| (SEQ ID NO. 3) | | | | | | |
| ARNTL | KMNSFIDEL | 1.09E−01 | 9.20E−02 | HLA-A0201: 14 | 8.44E−02 | 67% |
| (SEQ ID NO. 4) | | | | | | |
| ATG9A | RLIKFIYNI | 1.06E−01 | 1.28E−01 | HLA-A0201: 9 | 9.24E−02 | 67% |
| (SEQ ID NO. 5) | | | | | | |
| BRCA2 | KTNKFIYAI | 5.53E−03 | 2.94E−01 | HLA-A0201: 284 | 6.62E−05 | 83% |
| (SEQ ID NO. 6) | | | | | | |
| CDC14A | RLNKKIYEA | 4.01E−02 | 3.18E+00 | HLA-A0201: 77 | 1.64E−04 | 83% |
| (SEQ ID NO. 7) | | | | | | |
| NR2E1 | KLNKIISEI | 9.65E−01 | 3.12E−01 | HLA-A0201: 38 | 8.14E−02 | 67% |
| (SEQ ID NO. 8) | | | | | | |
| OR1I1 | MLNPFIYSI | 3.30E−02 | 4.21E−01 | HLA-A0201: 3 | 2.62E−02 | 67% |
| (SEQ ID NO. 9) | | | | | | |
| OR51B6 | FMNPFIYSI | 3.96E−02 | 6.25E−01 | HLA-A0201: 2 | 3.17E−02 | 67% |
| (SEQ ID NO. 10) | | | | | | |
| OR6C1 | MMNPFIYSL | 5.70E−02 | 1.24E−01 | HLA-A0201: 3 | 1.53E−01 | 67% |
| (SEQ ID NO. 11) | | | | | | |
| PTP4A1 | TLNKFIEEL | 2.12E−03 | 1.80E−01 | HLA-A0201: 92 | 1.28E−04 | 83% |
| (SEQ ID NO. 12) | | | | | | |
| RP1 | RMNGIIYEI | 9.66E−01 | 2.10E−01 | HLA-A0201: 8 | 5.75E−01 | 67% |
| (SEQ ID NO. 13) | | | | | | |
| RCL1 | ILNKFIPDI | 8.72E−01 | 4.76E−01 | HLA-A0201: 64 | 2.86E−02 | 67% |
| (SEQ ID NO. 14) | | | | | | |
| ZNF566 | FLKKEIYEI | 2.62E−03 | 5.27E−01 | HLA-A0201: 20 | 2.49E−04 | 67% |
| (SEQ ID NO. 15) | | | | | | |

### Example 4. Characterization of AFP158-Specific Antibodies

### Cross-Reactivity to AFP158 Homologous Peptides and Human Endogenous Self-Peptides

[0670] Out of 136 AFP158 specific phage clones, 76 representative clones were constructed as sdAb-mIgG2aFc or scFv-mIgG2aFc format and produced using HEK293-6E cells. In the sdAb-mIgG2aFc format, the two Fab in the mIgG2a were replaced by two identical sdAb. Similarly, in the scFv-mIgG2aFc format, the two Fab in in the mIgG2a were replaced by two identical scFv. The HEK293-6E cell supernatants containing sdAb/scFv-mIgG2aFc proteins were tested for their ability to recognize HLA-A*02:01/peptide (AFP158 or AFP158 homologous peptide) complexes on live T2 cell surfaces. Of 76 antibodies, 7 antibodies AS170036 (SEQ ID NO: 75), AS179723 (SEQ ID NO: 92), AS179732 (SEQ ID NO: 109), AS190259 (SEQ ID NO: 118), AS148691 (SEQ ID NO: 135), AS167821 (SEQ ID NO: 152) and AS167830 (SEQ ID NO: 160) showed the best selectivity of T2 cells loaded with AFP158 peptide over 12 homologous peptides. A positive control antibody was also constructed using ET1402L1 scFv sequence (SEQ ID NO: 433) fused to a C-terminal mouse IgG2a Fc region.

[0671] Purified proteins of 7 antibodies were prepared as follows. Expression plasmids were used to transfect 100 ml HEK293-6E cells. Supernatants were harvested 5-6 days after transfection. The antibodies were purified by Protein A chromatography (Genscript, Cat: L00464). Purified proteins were labeled with i647 according to manufacturer's manual (Alexa Fluor™ 647 NHS Ester, Invitrogen). Binding EC₅₀ of some purified antibodies to AFP158 loaded live T2 cells was determined by flow cytometry. As shown in FIG. 4A-4B, at antibody concentration of 30 or 50 nM the binding was saturated for most binders, therefore these concentrations were used for the subsequent screening assay.

[0672] In addition of 12 homologous peptides, 50 AFP158 irrelevant human endogenous self-peptides (SEQ ID NOs: 16-65) with high affinity to HLA-A*02:01 were also chosen from IEDB (Immune Epitope Database). At the concentration of 30 or 50 nM, binding of 7 antibodies to T2 cells loaded with AFP158, 50 endogenous self-peptides and 12 homologous peptides were carried out using flow cytometry. The four scFv antibodies (AS170036, AS179723, AS179732 and AS148691) (FIG. 5A) and one sdAb antibody AS167830 (FIG. 5B) specifically recognize AFP158 loaded T2 cells and do not recognize the endogenous self-peptides or AFP158 homologous peptides. AS190259 and ET1402L1 cross-react with one AFP158 homologous peptide PTP4A1 (FIG. 5A). AS167821 shows weak binding to T2 cell and more than 12 peptides (FIG. 5B).

### Epitope Mapping by Alanine Scanning

[0673] To investigate the precise peptide epitopes that are recognized by antibodies, human AFP158 peptides with alanine substitution at positions 1-9 (SEQ ID NOs: 66-74) were synthesized and loaded onto T2 cells. The binding between 30 or 50 nM i647 labeled antibodies and peptide-loaded T2 cells was assessed by flow cytometry. Amino acid positions on which alanine mutation caused >80% mean fluorescence intensity (MFI) reduction were arbitrarily defined as critical positions. As shown by FIG. 6, AS170036, AS167821 and AS167830 have 8 critical epitope positions (positions 2-9), AS179732 (positions 2, 3, 5-9), AS190259 (positions 2, 4-9), AS148691 (positions 1-5, 8, 9) have 7 critical epitope positions. For AS179723, there are 3 critical epitope positions (positions 2, 7, 8). In addition, alanine mutations at positions 3-6 also caused more than 60% reduction in MFI, suggesting these positions also contributed a lot to antibody binding. The results suggested that these antibodies may have good selectivity to AFP158.

### Binding Affinity to AFP158/HLA-A*02:01 Complex

[0674] The binding affinity between selected antibodies and AFP158/HLA-A*02:01 complex was determined by surface plasmon resonance (SPR) on a BIAcore T200 instrument (GE Healthcare). The experiment was carried out as follows. The purified sdAb/scFv-mIgG2aFc protein were captured through mIgG2a-Fc onto the sensorchip. Different concentrations (320, 160, 80, 40, 20, 10, 5, 2.5 nM) of AFP158/HLA-A*02:01 complex flowed over the sensorchip surface, and were allowed to bind the antibody for 100 s followed by injection of the running buffer to allow dissociation of the complex. On-rate (kₐ) and off-rate (k_{d}) were calculated based on association and dissociation curve, and were used to estimate the equilibrium dissociation constant (K_{D}). The affinity data were summarized in Table 5.

TABLE 5
Monovalent binding affinity of selected antibodies

| Antibody ID | ka (1/Ms) | kd (1/s) | KD (M) | Rmax (RU) | Chi² (RU²) | U-value |
|---|---|---|---|---|---|---|
| AS170036 | 2.4E+05 | 6.0E−02 | 2.5E−07 | 48.49 | 0.061 | 1 |
| AS179723 | 1.1E+05 | 4.2E−03 | 3.9E−08 | 31.32 | 0.025 | 1 |
| AS179732 | 1.3E+05 | 8.6E−03 | 6.7E−08 | 26.00 | 0.019 | 1 |
| AS190259 | 3.5E+05 | 1.4E−01 | 3.9E−07 | 44.94 | 0.089 | 1 |
| AS148691 | 7.1E+04 | 5.0E−03 | 7.1E−08 | 45.23 | 0.069 | 1 |
| AS167821 | 4.1E+05 | 3.9E−02 | 9.5E−08 | 67.67 | 0.265 | 1 |
| AS167830 | 2.7E+05 | 7.0E−02 | 2.6E−07 | 76.31 | 0.089 | 1 |

### Example 5. Antibody Humanization and Characterization

[0675] Four camel antibodies, namely AS170036, AS179723, AS179732 and AS190259 were selected for humanization using CDR grafting technology (Winter Gregory, 1993). It should be noticed that the heavy chain of AS179723 and AS179732 are identical. Briefly, human sequences with highest identity to AS170036, AS179723, AS179732 and AS190259 were identified and analyzed (Foote and Winter, 1992). The most appropriate human frameworks on which to build the CDR grafted heavy and light chains were identified. For the heavy chain, the frameworks encoded by Genbank accession #ACR16153.1, CAA85580.1 and ACR16153.1, the sequences of which are incorporated herein by references, were determined to be the most appropriate for AS170036, AS179723/AS179732 and AS190259, respectively. For the light chain, the frameworks encoded by Genbank accession #QEP11962.1, BAL04188.1, ABA26233.1 and QDJ57969.1, the sequences of which are incorporated herein by references, were determined to be the most appropriate for AS170036, AS179723, AS179732 and AS190259, respectively. For AS170036 humanization, there are 2 humanized VH variants, i.e. AS170036 VH1 (SEQ ID NO: 168), and AS170036 VH2 (SEQ ID NO: 169) and 2 humanized VL variants, i.e. AS170036 VL1 (SEQ ID NO: 170) and AS170036 VL2 (SEQ ID NO: 171). For AS179723 humanization, there are 3 humanized VH variants, i.e. AS179723/AS179732 VH1 (SEQ ID NO: 172), AS179723/AS179732 VH1g1 (SEQ ID NO: 173) and AS179723/AS179732 VH1g1-N73Y (SEQ ID NO: 174) and 2 humanized VL variants, i.e. AS179723 VL1 (SEQ ID NO: 175) and AS179723 VL1g1 (SEQ ID NO: 176). The N73Y mutation was a back mutation in heavy chain FR3 to improve antibody affinity after humanization using CDR grafting technique. For AS179732 humanization, there are 3 humanized VH variants, i.e. AS179723/AS179732 VH1 (SEQ ID NO: 172), AS179723/AS179732 VH1g1 (SEQ ID NO: 173) and AS179723/AS179732 VH1g1-N73Y (SEQ ID NO: 174) and 2 humanized VL variants, i.e. AS179732 VL1 (SEQ ID NO: 177) and AS179732 VL1g1 (SEQ ID NO: 178). For AS190259 humanization, there are 2 humanized VH variants, i.e. AS190259 VH1 (SEQ ID NO: 179), and AS190259 VH1g1 (SEQ ID NO: 180) and 2 humanized VL variants, i.e. AS190259 VL1 (SEQ ID NO: 181) and AS190259 VL2 (SEQ ID NO: 182).

[0676] Humanized heavy chains and light chains were combined, and used to produce a series of humanized antibodies. These antibodies were synthesized as scFv-mIgG2aFc and transiently produced using HEK293 cells. The antibodies in the supernatant were subjected to SPR affinity assessment. The binding affinities of the humanized variants to AFP158/HLA-A*02:01 complex were measured by method mentioned in Example 4. The affinity data are summarized in Tables 6-9 below. According the affinity assessment, for all four camel antibodies there is at least one humanized variant with little or no affinity loss.

TABLE 6
Monovalent binding affinity of humanized AS170036 clones

| | ka | kd | KD | Rmax | Chi² | |
|---|---|---|---|---|---|---|
| Antibody ID | (1/Ms) | (1/s) | (M) | (RU) | (RU²) | U-value |
| AS170036 | 4.3E+05 | 1.9E−01 | 4.5E−07 | 91.10 | 0.034 | 1 |
| AS170036 VL1VH1 | 1.7E+05 | 6.2E−02 | 3.6E−07 | 95.17 | 0.047 | 1 |
| AS170036 VL2VH1 | 2.8E+05 | 9.5E−02 | 3.4E−07 | 88.81 | 0.059 | 1 |
| AS170036 VL1VH2 | 1.9E+05 | 7.1E−02 | 3.8E−07 | 90.91 | 0.104 | 1 |
| AS170036 VL2VH2 | 1.9E+05 | 7.2E−02 | 3.9E−07 | 93.20 | 0.076 | 1 |

TABLE 7
Monovalent binding affinity of humanized AS179723 clones

| | ka | kd | KD | Rmax | Chi² | |
|---|---|---|---|---|---|---|
| Antibody ID | (1/Ms) | (1/s) | (M) | (RU) | (RU²) | U-value |
| AS179723 | 1.5E+05 | 4.1E−03 | 2.8E−08 | 18.5 | 0.018 | 1 |
| AS179723 VL1VH1 | 9.8E+04 | 3.1E−02 | 3.2E−07 | 33.6 | 0.027 | 1 |
| AS179723 VL1VH1g1 | 9.9E+04 | 3.0E−02 | 3.1E−07 | 34.5 | 0.042 | 1 |
| AS179723 VL1g1VH1 | 9.3E+04 | 3.4E−02 | 3.6E−07 | 39.0 | 0.027 | 1 |
| AS179723 VL1g1VH1g1 | 9.1E+04 | 2.9E−02 | 3.2E−07 | 42.3 | 0.033 | 1 |
| AS179723 VL1g1VH1g1- | 1.4E+05 | 8.0E−03 | 5.6E−08 | 30.72 | 0.030 | 1 |
| N73Y | | | | | | |

TABLE 8
Monovalent binding affinity of humanized AS179732 clones

| | ka | kd | KD | Rmax | Chi² | |
|---|---|---|---|---|---|---|
| Antibody ID | (1/Ms) | (1/s) | (M) | (RU) | (RU²) | U-value |
| AS179732 | 1.6E+05 | 7.5E−03 | 4.7E−08 | 23.4 | 0.048 | 1 |
| AS179732 VL1VH1 | 1.3E+05 | 5.6E−02 | 4.4E−07 | 38.8 | 0.031 | 1 |
| AS179732 VL1VH1g1 | 1.3E+05 | 6.5E−02 | 5.2E−07 | 43.5 | 0.026 | 1 |
| AS179732 VL1g1VH1 | 1.2E+05 | 5.6E−02 | 4.5E−07 | 46.9 | 0.045 | 1 |
| AS179732 VL1g1VH1g1 | 1.3E+05 | 5.7E−02 | 4.5E−07 | 55.7 | 0.042 | 1 |
| AS179732 VL1g1VH1g1- | 2.4E+05 | 1.3E−02 | 5.4E−08 | 32.78 | 0.0422 | 1 |
| N73Y | | | | | | |

TABLE 9
Monovalent binding affinity of humanized AS190259 clones

| | ka | kd | KD | Rmax | Chi² | |
|---|---|---|---|---|---|---|
| Antibody ID | (1/Ms) | (1/s) | (M) | (RU) | (RU²) | U-value |
| AS190259 | 1.1E+06 | 2.5E−01 | 2.2E−07 | 36.56 | 0.061 | 2 |
| AS190259 VL1VH1 | 2.0E+06 | 3.9E−01 | 2.0E−07 | 38.31 | 0.021 | 2 |
| AS190259 VL1VH1g1 | 7.3E+05 | 4.1E−01 | 5.6E−07 | 42.74 | 0.047 | 3 |
| AS190259 VL2VH1 | 1.4E+06 | 3.0E−01 | 2.2E−07 | 42.71 | 0.036 | 1 |
| AS190259 VL2VH1g1 | 9.0E+05 | 3.1E−01 | 3.4E−07 | 50.07 | 0.028 | 1 |

[0677] Four humanized antibodies were produced, labeled by i647 and subjected to the binding, selectivity, epitope assessment assays as described in Example 4. As shown in FIG. 7, at antibody concentration of 30 or 50 nM the binding was saturated for most binders, therefore these concentrations were used for the subsequent screening assay. As shown in FIG. 8, AS170036 VL1VH1 (SEQ ID NO: 183) specifically recognize AFP158 loaded T2 cells and do not cross-react with the endogenous self-peptides and AFP158 homologous peptides. AS190259 VL1VH1 (SEQ ID NO: 189) cross-react with one AFP158 homologous peptide PTP4A1. AS179723 VL1g1VH1g1-N73Y (SEQ ID NO: 185) and AS179732 VL1g1VH1g1-N73Y (SEQ ID NO: 187) show weak binding to T2 cell, endogenous self-peptides and AFP158 homologous peptides. As shown in FIG. 9, AS170036 VL1VH1 has 8 critical epitope positions (positions 2-9), AS190259 VL1VH1 has 7 critical epitope positons (positions 2, 4-9), AS179723 VL1g1VH1g1-N73Y and AS179732 VL1g1VH1g1-N73Y have 2 critical epitope positions (positions 7, 8). In addition, alanine mutations at positions 2, 4-6 also caused nearly more than 60% reduction in MFI, suggesting these positions also contributed a lot to antibody binding. The result suggested the binding affinity and selectivity of antibody was retained after humanization.

### Example 6. AS170036 VL1VH1 Affinity Maturation and Characterization

[0678] The AS170036 VL1VH1 scFv (SEQ ID NO: 183) with a 6×Histidine tag at C-terminal was synthesized by Genscript and inserted into an antibody fragment expression vector. Twenty amino acid in AS170036 VL1VH1 CDRs were selected for site-directed mutation, i.e. E32 and Y34 in CDR1, Y93, D97 and H98 in CDR3 of VL, N52, S53, G56, S57 and P58 in CDR2, F101, D102, G103, S104, W105, F106, L107, G108, P109 and P110 in CDR3 of VH. The selected CDR residues were mutated to the other amino acids except cysteine. The site-directed mutation was carried out using Q5 Site-Directed Mutagenesis Kit Mix (NEB, Cat. No: E0552S) according to manufacturer's manual. The site-directed mutation was confirmed by DNA sequencing and the individual plasmid was used to transform competent TG1 E. coli cells. The individual mutants were grown in 96 deep well plates containing 1 ml 2YT medium. The expression of antibody fragment was induced by adding 1.0 mM IPTG. The scFv proteins in the supernatant were analyzed for their ability to bind to biotinylated AFP158/HLA-A*02:01 complex (Bio-AFP158) or biotinylated control peptide/HLA-A*02:01 complex (Bio-control) by ELISA.

[0679] Among all 361 clones, 183 clones were able to bind to AFP158/HLA-A*02:01 complex (Tables 10 and 11). The 183 clones were then subjected to surface plasmon resonance (SPR) affinity measurement on a BIAcore T200 instrument (GE Healthcare).

[0680] The HCDR sequences and LCDR sequences of AS170036 are shown below (with mutated amino acid residues in bold):

>AS170036 VH1
(SEQ ID NO: 168)
EVQLVESGGGLVQPGGSLRLSCAASGFTFSSYAMSWVRQAPGKGLEWVST
INSGTGSPYYADSVKGRFTISRDNSKNTLYLQMNSLRAEDTAVYYCAKNF
FDGSWFLGPPAMDYWGQGTLVTVSS
>AS170036 VL1
(SEQ ID NO: 170)
QSALTQPRSVSGSPGQSVTISCAGTSSDVGSENYVSWYQQHPGKAPKLMI
YQVNKRASGVPDRFSGSKSGNTASLTISGLQAEDEADYYCASYRSSDHNI
VFGGGTKLTVL

TABLE 10
Binding Affinity of AS170036 VH Mutants Able
to Bind to an AFP158/HLA-A*02:01 Complex

| | | | | Affinity |
|---|---|---|---|---|
| NO. | Position | Ligand | KD (M) | increase |
| 1 | X₁ | HS53A | 1.2E−06 | 0.2 |
| 2 | X₁ | HS53T | 6.5E−07 | 0.4 |
| 3 | X₂ | HG56A | 1.6E−07 | 1.4 |
| 4 | X₂ | HG56D | 2.3E−07 | 1.0 |
| 5 | X₂ | HG56E | 2.4E−07 | 1.0 |
| 6 | X₂ | HG56F | 9.8E−08 | 2.3 |
| 7 | X₂ | HG56H | 1.5E−07 | 1.5 |
| 8 | X₂ | HG56I | 1.1E−06 | 0.2 |
| 9 | X₂ | HG56K | 3.5E−07 | 0.7 |
| 10 | X₂ | HG56L | 2.9E−07 | 0.8 |
| 11 | X₂ | HG56M | 1.3E−07 | 1.7 |
| 12 | X₂ | HG56N | 9.2E−08 | 2.5 |
| 13 | X₂ | HG56P | 1.6E−06 | 0.1 |
| 14 | X₂ | HG56Q | 2.4E−07 | 1.0 |
| 15 | X₂ | HG56R | 3.0E−07 | 0.8 |
| 16 | X₂ | HG56S | 1.6E−07 | 1.5 |
| 17 | X₂ | HG56T | 3.4E−07 | 0.7 |
| 18 | X₂ | HG56V | 6.3E−07 | 0.4 |
| 19 | X₂ | HG56W | 1.3E−07 | 1.7 |
| 20 | X₂ | HG56Y | 3.5E−08 | 6.6 |
| 21 | X₃ | HS57A | 2.1E−07 | 1.2 |
| 22 | X₃ | HS57D | 2.0E−07 | 1.2 |
| 23 | X₃ | HS57F | 1.8E−07 | 1.4 |
| 24 | X₃ | HS57H | 3.5E−08 | 6.9 |
| 25 | X₃ | HS57K | 5.6E−08 | 4.4 |
| 26 | X₃ | HS57M | 9.0E−08 | 2.7 |
| 27 | X₃ | HS57N | 1.7E−07 | 1.5 |
| 28 | X₃ | HS57Q | 1.0E−07 | 2.4 |
| 29 | X₃ | HS57R | 8.8E−08 | 2.8 |
| 30 | X₃ | HS57T | 2.2E−07 | 1.1 |
| 31 | X₃ | HS57W | 3.8E−07 | 0.6 |
| 32 | X₃ | HS57Y | 2.0E−07 | 1.2 |
| 33 | X₄ | HP58A | 3.8E−07 | 0.7 |
| 34 | X₄ | HP58D | 6.6E−07 | 0.4 |
| 35 | X₄ | HP58E | 6.0E−07 | 0.5 |
| 36 | X₄ | HP58F | 1.7E−06 | 0.2 |
| 37 | X₄ | HP58G | 3.2E−07 | 0.9 |
| 38 | X₄ | HP58H | 1.0E−06 | 0.3 |
| 39 | X₄ | HP58K | 8.6E−07 | 0.3 |
| 40 | X₄ | HP58M | 1.5E−06 | 0.2 |
| 41 | X₄ | HP58N | 1.5E−06 | 0.2 |
| 42 | X₄ | HP58Q | 5.0E−07 | 0.5 |
| 43 | X₄ | HP58R | 1.2E−06 | 0.2 |
| 44 | X₄ | HP58S | 7.8E−07 | 0.3 |
| 45 | X₄ | HP58T | 7.5E−07 | 0.4 |
| 46 | X₄ | HP58V | 1.2E−06 | 0.2 |
| 47 | X₄ | HP58W | 2.7E−06 | 0.1 |
| 48 | X₄ | HP58Y | 3.5E−06 | 0.1 |
| 49 | X₅ | HF101D | 1.4E−06 | 0.2 |
| 50 | X₅ | HF101H | 8.3E−07 | 0.3 |
| 51 | X₅ | HF101N | 3.7E−06 | 0.1 |
| 52 | X₅ | HF101W | 3.0E−07 | 0.8 |
| 53 | X₅ | HF101Y | 2.1E−07 | 1.1 |
| 54 | X₆ | HD102A | 5.9E−07 | 0.4 |
| 55 | X₆ | HD102E | 1.9E−07 | 1.2 |
| 56 | X₆ | HD102G | 2.5E−06 | 0.1 |
| 57 | X₆ | HD102I | 1.9E−06 | 0.1 |
| 58 | X₆ | HD102L | 1.7E−06 | 0.1 |
| 59 | X₆ | HD102M | 8.4E−07 | 0.3 |
| 60 | X₆ | HD102N | 2.5E−06 | 0.1 |
| 61 | X₆ | HD102P | 8.8E−07 | 0.3 |
| 62 | X₆ | HD102Q | 9.5E−07 | 0.2 |
| 63 | X₆ | HD102S | 5.2E−07 | 0.4 |
| 64 | X₆ | HD102T | 1.8E−06 | 0.1 |
| 65 | X₆ | HD102V | 1.8E−06 | 0.1 |
| 66 | X₆ | HD102W | 2.2E−06 | 0.1 |
| 67 | X₇ | HW105F | 1.4E−06 | 0.2 |
| 68 | X₇ | HW105M | 1.2E−06 | 0.2 |
| 69 | X₈ | HF106W | 6.3E−07 | 0.4 |
| 70 | X₉ | HL107A | 3.3E−06 | 0.1 |
| 71 | X₉ | HL107G | 4.4E−06 | 0.1 |
| 72 | X₉ | HL107I | 2.4E−07 | 1.1 |
| 73 | X₉ | HL107M | 3.7E−07 | 0.7 |
| 74 | X₉ | HL107N | 5.3E−07 | 0.5 |
| 75 | X₉ | HL107Q | 1.6E−06 | 0.2 |
| 76 | X₉ | HL107S | 4.1E−06 | 0.1 |
| 77 | X₉ | HL107T | 2.8E−06 | 0.1 |
| 78 | X₉ | HL107V | 2.5E−06 | 0.1 |
| 79 | X₁₀ | HG108A | 4.2E−08 | 5.5 |
| 80 | X₁₀ | HG108D | 4.2E−08 | 5.5 |
| 81 | X₁₀ | HG108E | 5.6E−08 | 4.1 |
| 82 | X₁₀ | HG108F | 8.1E−07 | 0.3 |
| 83 | X₁₀ | HG108H | 6.6E−07 | 0.4 |
| 84 | X₁₀ | HG108I | 1.0E−06 | 0.2 |
| 85 | X₁₀ | HG108L | 2.0E−07 | 1.4 |
| 86 | X₁₀ | HG108M | 5.8E−08 | 4.7 |
| 87 | X₁₀ | HG108N | 1.4E−07 | 2.0 |
| 88 | X₁₀ | HG108Q | 2.0E−07 | 1.4 |
| 89 | X₁₀ | HG108R | 1.5E−06 | 0.2 |
| 90 | X₁₀ | HG108S | 9.6E−08 | 2.8 |
| 91 | X₁₀ | HG108T | 5.3E−07 | 0.5 |
| 92 | X₁₀ | HG108V | 3.7E−07 | 0.7 |
| 93 | X₁₀ | HG108W | 2.3E−06 | 0.1 |
| 94 | X₁₀ | HG108Y | 1.1E−06 | 0.2 |
| 95 | X₁₁ | HP109A | 2.7E−06 | 0.1 |
| 96 | X₁₁ | HP109N | 4.5E−06 | 0.1 |
| 97 | X₁₁ | HP109T | 5.4E−06 | 0.1 |
| 98 | X₁₂ | HP110A | 2.1E−07 | 1.3 |
| 99 | X₁₂ | HP110D | 5.4E−07 | 0.5 |
| 100 | X₁₂ | HP110E | 1.5E−07 | 1.8 |
| 101 | X₁₂ | HP110G | 2.6E−07 | 1.0 |
| 102 | X₁₂ | HP110I | 1.5E−06 | 0.2 |
| 103 | X₁₂ | HP110L | 1.5E−06 | 0.2 |
| 104 | X₁₂ | HP110N | 1.2E−06 | 0.2 |
| 105 | X₁₂ | HP110Q | 3.0E−07 | 0.9 |
| 106 | X₁₂ | HP110S | 3.0E−07 | 0.8 |
| 107 | X₁₂ | HP110T | 1.8E−07 | 1.3 |
| 108 | X₁₂ | HP110V | 4.0E−07 | 0.6 |

TABLE 11
Binding Affinity of AS170036 VL Mutants Able
to Bind to an AFP158/HLA-A*02:01 Complex

| | | | | Affinity |
|---|---|---|---|---|
| NO. | Position | Ligand | KD (M) | increase |
| 1 | X₁₃ | LE32A | 7.0E−07 | 0.3 |
| 2 | X₁₃ | LE32D | 1.9E−07 | 1.3 |
| 3 | X₁₃ | LE32G | 3.5E−07 | 0.7 |
| 4 | X₁₃ | LE32H | 8.3E−07 | 0.3 |
| 5 | X₁₃ | LE32I | 8.6E−07 | 0.3 |
| 6 | X₁₃ | LE32L | 9.8E−07 | 0.3 |
| 7 | X₁₃ | LE32M | 5.9E−07 | 0.4 |
| 8 | X₁₃ | LE32N | 6.9E−07 | 0.4 |
| 9 | X₁₃ | LE32P | 1.4E−06 | 0.2 |
| 10 | X₁₃ | LE32Q | 5.7E−07 | 0.4 |
| 11 | X₁₃ | LE32S | 5.0E−07 | 0.5 |
| 12 | X₁₃ | LE32T | 7.7E−07 | 0.3 |
| 13 | X₁₃ | LE32V | 9.3E−07 | 0.3 |
| 14 | X₁₃ | LE32W | 1.0E−07 | 2.4 |
| 15 | X₁₃ | LE32Y | 4.3E−07 | 0.6 |
| 16 | X₁₄ | LY34A | 1.7E−06 | 0.1 |
| 17 | X₁₄ | LY34D | 7.4E−07 | 0.3 |
| 18 | X₁₄ | LY34E | 1.4E−06 | 0.2 |
| 19 | X₁₄ | LY34F | 7.8E−07 | 0.3 |
| 20 | X₁₄ | LY34G | 1.7E−06 | 0.1 |
| 21 | X₁₄ | LY34H | 5.4E−07 | 0.5 |
| 22 | X₁₄ | LY34I | 1.8E−06 | 0.1 |
| 23 | X₁₄ | LY34L | 7.3E−07 | 0.3 |
| 24 | X₁₄ | LY34M | 1.1E−06 | 0.2 |
| 25 | X₁₄ | LY34P | 1.4E−06 | 0.2 |
| 26 | X₁₄ | LY34S | 1.0E−06 | 0.2 |
| 27 | X₁₄ | LY34T | 2.2E−06 | 0.1 |
| 28 | X₁₄ | LY34V | 7.4E−07 | 0.3 |
| 29 | X₁₄ | LY34W | 4.1E−07 | 0.6 |
| 30 | X₁₅ | LY93D | 1.2E−06 | 0.2 |
| 31 | X₁₅ | LY93F | 1.4E−07 | 1.8 |
| 32 | X₁₅ | LY93H | 6.2E−07 | 0.4 |
| 33 | X₁₅ | LY93I | 4.4E−07 | 0.6 |
| 34 | X₁₅ | LY93L | 1.8E−07 | 1.3 |
| 35 | X₁₅ | LY93M | 2.3E−07 | 1.1 |
| 36 | X₁₅ | LY93N | 1.4E−06 | 0.2 |
| 37 | X₁₅ | LY93Q | 3.8E−07 | 0.6 |
| 38 | X₁₅ | LY93T | 8.4E−07 | 0.3 |
| 39 | X₁₅ | LY93V | 4.5E−07 | 0.5 |
| 40 | X₁₅ | LY93W | 2.4E−07 | 1.0 |
| 41 | X₁₆ | LD97A | 4.7E−07 | 0.5 |
| 42 | X₁₆ | LD97E | 6.9E−07 | 0.4 |
| 43 | X₁₆ | LD97F | 4.5E−07 | 0.5 |
| 44 | X₁₆ | LD97G | 3.1E−07 | 0.8 |
| 45 | X₁₆ | LD97H | 4.2E−07 | 0.6 |
| 46 | X₁₆ | LD97I | 6.5E−07 | 0.4 |
| 47 | X₁₆ | LD97K | 4.1E−07 | 0.6 |
| 48 | X₁₆ | LD97L | 6.4E−07 | 0.4 |
| 49 | X₁₆ | LD97M | 5.9E−07 | 0.4 |
| 50 | X₁₆ | LD97N | 2.4E−07 | 1.0 |
| 51 | X₁₆ | LD97P | 7.9E−07 | 0.3 |
| 52 | X₁₆ | LD97Q | 5.8E−07 | 0.4 |
| 53 | X₁₆ | LD97R | 5.2E−07 | 0.5 |
| 54 | X₁₆ | LD97S | 4.2E−07 | 0.6 |
| 55 | X₁₆ | LD97T | 3.6E−07 | 0.7 |
| 56 | X₁₆ | LD97V | 6.6E−07 | 0.4 |
| 57 | X₁₆ | LD97W | 5.7E−07 | 0.4 |
| 58 | X₁₆ | LD97Y | 5.7E−07 | 0.4 |
| 59 | X₁₇ | LH98A | 1.1E−07 | 2.3 |
| 60 | X₁₇ | LH98D | 1.1E−06 | 0.2 |
| 61 | X₁₇ | LH98F | 7.4E−08 | 3.3 |
| 62 | X₁₇ | LH98G | 2.8E−07 | 0.9 |
| 63 | X₁₇ | LH98I | 7.8E−08 | 3.1 |
| 64 | X₁₇ | LH98K | 1.1E−06 | 0.2 |
| 65 | X₁₇ | LH98L | 2.0E−07 | 1.2 |
| 66 | X₁₇ | LH98M | 1.4E−07 | 1.8 |
| 67 | X₁₇ | LH98N | 1.6E−07 | 1.5 |
| 68 | X₁₇ | LH98P | 7.0E−08 | 3.5 |
| 69 | X₁₇ | LH98Q | 7.5E−08 | 3.3 |
| 70 | X₁₇ | LH98R | 2.2E−07 | 1.1 |
| 71 | X₁₇ | LH98S | 1.8E−07 | 1.4 |
| 72 | X₁₇ | LH98T | 8.4E−08 | 2.9 |
| 73 | X₁₇ | LH98V | 7.8E−08 | 3.2 |
| 74 | X₁₇ | LH98W | 2.0E−07 | 1.2 |
| 75 | X₁₇ | LH98Y | 1.6E−07 | 1.6 |

[0681] Among the 183 binders, 93 have affinities higher than or comparable to that of the wild type antibody (Tables 12 and 13).

TABLE 12
Binding Affinity of AS170036 VH Mutants Having Higher Affinity
to an AFP158/HLA-A*02:01 Complex Than AS170036 VL1VH1

| | | | | Affinity |
|---|---|---|---|---|
| NO. | Position | Ligand | KD (M) | increase |
| 1 | X₁ | HG56A | 1.6E−07 | 1.4 |
| 2 | X₁ | HG56D | 2.3E−07 | 1.0 |
| 3 | X₁ | HG56E | 2.4E−07 | 1.0 |
| 4 | X₁ | HG56F | 9.8E−08 | 2.3 |
| 5 | X₁ | HG56H | 1.5E−07 | 1.5 |
| 6 | X₁ | HG56K | 3.5E−07 | 0.7 |
| 7 | X₁ | HG56L | 2.9E−07 | 0.8 |
| 8 | X₁ | HG56M | 1.3E−07 | 1.7 |
| 9 | X₁ | HG56N | 9.2E−08 | 2.5 |
| 10 | X₁ | HG56Q | 2.4E−07 | 1.0 |
| 11 | X₁ | HG56R | 3.0E−07 | 0.8 |
| 12 | X₁ | HG56S | 1.6E−07 | 1.5 |
| 13 | X₁ | HG56T | 3.4E−07 | 0.7 |
| 14 | X₁ | HG56W | 1.3E−07 | 1.7 |
| 15 | X₁ | HG56Y | 3.5E−08 | 6.6 |
| 16 | X₂ | HS57A | 2.1E−07 | 1.2 |
| 17 | X₂ | HS57D | 2.0E−07 | 1.2 |
| 18 | X₂ | HS57F | 1.8E−07 | 1.4 |
| 19 | X₂ | HS57H | 3.5E−08 | 6.9 |
| 20 | X₂ | HS57K | 5.6E−08 | 4.4 |
| 21 | X₂ | HS57M | 9.0E−08 | 2.7 |
| 22 | X₂ | HS57N | 1.7E−07 | 1.5 |
| 23 | X₂ | HS57Q | 1.0E−07 | 2.4 |
| 24 | X₂ | HS57R | 8.8E−08 | 2.8 |
| 25 | X₂ | HS57T | 2.2E−07 | 1.1 |
| 26 | X₂ | HS57W | 3.8E−07 | 0.6 |
| 27 | X₂ | HS57Y | 2.0E−07 | 1.2 |
| 28 | X₃ | HP58A | 3.8E−07 | 0.7 |
| 29 | X₃ | HP58E | 6.0E−07 | 0.5 |
| 30 | X₃ | HP58G | 3.2E−07 | 0.9 |
| 31 | X₃ | HP58Q | 5.0E−07 | 0.5 |
| 32 | X₄ | HF101W | 3.0E−07 | 0.8 |
| 33 | X₄ | HF101Y | 2.1E−07 | 1.1 |
| 34 | X₅ | HD102E | 1.9E−07 | 1.2 |
| 35 | X₆ | HL107I | 2.4E−07 | 1.1 |
| 36 | X₆ | HL107M | 3.7E−07 | 0.7 |
| 37 | X₆ | HL107N | 5.3E−07 | 0.5 |
| 38 | X₇ | HG108A | 4.2E−08 | 5.5 |
| 39 | X₇ | HG108D | 4.2E−08 | 5.5 |
| 40 | X₇ | HG108E | 5.6E−08 | 4.1 |
| 41 | X₇ | HG108L | 2.0E−07 | 1.4 |
| 42 | X₇ | HG108M | 5.8E−08 | 4.7 |
| 43 | X₇ | HG108N | 1.4E−07 | 2.0 |
| 44 | X₇ | HG108Q | 2.0E−07 | 1.4 |
| 45 | X₇ | HG108S | 9.6E−08 | 2.8 |
| 46 | X₇ | HG108T | 5.3E−07 | 0.5 |
| 47 | X₇ | HG108V | 3.7E−07 | 0.7 |
| 48 | X₈ | HP110A | 2.1E−07 | 1.3 |
| 49 | X₈ | HP110D | 5.4E−07 | 0.5 |
| 50 | X₈ | HP110E | 1.5E−07 | 1.8 |
| 51 | X₈ | HP110G | 2.6E−07 | 1.0 |
| 52 | X₈ | HP110Q | 3.0E−07 | 0.9 |
| 53 | X₈ | HP110S | 3.0E−07 | 0.8 |
| 54 | X₈ | HP110T | 1.8E−07 | 1.3 |
| 55 | X₈ | HP110V | 4.0E−07 | 0.6 |

TABLE 13
Binding Affinity of AS170036 VL Mutants Having Higher Affinity
to an AFP158/HLA-A*02:01 Complex Than AS170036 VL1VH1

| | | | | Affinity |
|---|---|---|---|---|
| NO. | Position | Ligand | KD (M) | increase |
| 1 | X₉ | LE32D | 1.9E−07 | 1.3 |
| 2 | X₉ | LE32G | 3.5E−07 | 0.7 |
| 3 | X₉ | LE32S | 5.0E−07 | 0.5 |
| 4 | X₉ | LE32W | 1.0E−07 | 2.4 |
| 5 | X₉ | LE32Y | 4.3E−07 | 0.6 |
| 6 | X₁₀ | LY34H | 5.4E−07 | 0.5 |
| 7 | X₁₀ | LY34W | 4.1E−07 | 0.6 |
| 8 | X₁₁ | LY93F | 1.4E−07 | 1.8 |
| 9 | X₁₁ | LY93I | 4.4E−07 | 0.6 |
| 10 | X₁₁ | LY93L | 1.8E−07 | 1.3 |
| 11 | X₁₁ | LY93M | 2.3E−07 | 1.1 |
| 12 | X₁₁ | LY93Q | 3.8E−07 | 0.6 |
| 13 | X₁₁ | LY93V | 4.5E−07 | 0.5 |
| 14 | X₁₁ | LY93W | 2.4E−07 | 1.0 |
| 15 | X₁₂ | LD97A | 4.7E−07 | 0.5 |
| 16 | X₁₂ | LD97F | 4.5E−07 | 0.5 |
| 17 | X₁₂ | LD97G | 3.1E−07 | 0.8 |
| 18 | X₁₂ | LD97H | 4.2E−07 | 0.6 |
| 19 | X₁₂ | LD97K | 4.1E−07 | 0.6 |
| 20 | X₁₂ | LD97N | 2.4E−07 | 1.0 |
| 21 | X₁₂ | LD97R | 5.2E−07 | 0.5 |
| 22 | X₁₂ | LD97S | 4.2E−07 | 0.6 |
| 23 | X₁₂ | LD97T | 3.6E−07 | 0.7 |
| 24 | X₁₃ | LH98A | 1.1E−07 | 2.3 |
| 25 | X₁₃ | LH98F | 7.4E−08 | 3.3 |
| 26 | X₁₃ | LH98G | 2.8E−07 | 0.9 |
| 27 | X₁₃ | LH98I | 7.8E−08 | 3.1 |
| 28 | X₁₃ | LH98L | 2.0E−07 | 1.2 |
| 29 | X₁₃ | LH98M | 1.4E−07 | 1.8 |
| 30 | X₁₃ | LH98N | 1.6E−07 | 1.5 |
| 31 | X₁₃ | LH98P | 7.0E−08 | 3.5 |
| 32 | X₁₃ | LH98Q | 7.5E−08 | 3.3 |
| 33 | X₁₃ | LH98R | 2.2E−07 | 1.1 |
| 34 | X₁₃ | LH98S | 1.8E−07 | 1.4 |
| 35 | X₁₃ | LH98T | 8.4E−08 | 2.9 |
| 36 | X₁₃ | LH98V | 7.8E−08 | 3.2 |
| 37 | X₁₃ | LH98W | 2.0E−07 | 1.2 |
| 38 | X₁₃ | LH98Y | 1.6E−07 | 1.6 |

[0682] The experiment was carried out as follows. The crude scFv protein were captured onto the sensorchip. Different concentrations (320, 160, 40 nM) of AFP158/HLA-A*02:01 complex flowed over the sensorchip surface, and were allowed to bind the antibody fragment for 100 s followed by injection of the running buffer to allow dissociation of the complex. On-rate (k_{d}) and off-rate (k_{d}) were calculated based on association and dissociation curve, and were used to estimate the equilibrium dissociation constant (K_{D}). As shown in Table 14, there are 22 muteins (SEQ ID NOs: 191-212) with more than 2 fold affinity increase to AFP158/HLA-A*02:01 complex.

[0683] The above 22 muteins were then tested for binding to 12 AFP158 homologous peptides by SPR to evaluate their selectivity. We therefore generate recombinant AFP158 homologous peptides/HLA-A*02:01 complex (with method described in Example 1) and measured the binding affinity of the 22 muteins to these complexes by method described above. Neither of the 22 muteins recognize these AFP158 homologous peptides. Table 8 shows the SPR responses of 11 representative muteins binding to AFP158/HLA-A*02:01 and AFP158 homologous peptides/HLA-A*02:01 complexes. Compared to the binding response to AFP158/HLA-A*02:01 complex, these muteins shows low or no binding to AFP158 homologous peptides/HLA-A*02:01 complexes (all below 3.5 RU), indicating good selectivity to AFP158.

TABLE 14
Monovalent binding affinity of AS170036 VL1VH1 site-directed mutation clones

| SEQ ID | | ka | kd | KD | Affinity |
|---|---|---|---|---|---|
| NO. | Ligand | (1/Ms) | (1/s) | (M) | increase |
| 183 | AS170036 VL1VH1 | 3.8E+05 | 1.0E−01 | 2.7E−07 | 1.0 |
| 191 | AS170036 VL1VH1-VLH98V | 2.3E+05 | 1.8E−02 | 7.8E−08 | 3.2 |
| 192 | AS170036 VL1VH1-VLH98T | 2.9E+05 | 2.5E−02 | 8.4E−08 | 2.9 |
| 193 | AS170036 VL1VH1-VLH98Q | 2.2E+05 | 1.6E−02 | 7.5E−08 | 3.3 |
| 194 | AS170036 VL1VH1-VLH98P | 2.4E+05 | 1.7E−02 | 7.0E−08 | 3.5 |
| 195 | AS170036 VL1VH1-VLH98I | 2.3E+05 | 1.8E−02 | 7.8E−08 | 3.1 |
| 196 | AS170036 VL1VH1-VLH98F | 4.5E+05 | 3.3E−02 | 7.4E−08 | 3.3 |
| 197 | AS170036 VL1VH1-VLH98A | 2.6E+05 | 2.7E−02 | 1.1E−07 | 2.3 |
| 198 | AS170036 VL1VH1-VLE32W | 1.5E+05 | 1.6E−02 | 1.0E−07 | 2.4 |
| 199 | AS170036 VL1VH1-VHG56Y | 1.7E+05 | 6.0E−03 | 3.5E−08 | 6.6 |
| 200 | AS170036 VL1VH1-VHG56N | 2.7E+05 | 2.5E−02 | 9.2E−08 | 2.5 |
| 201 | AS170036 VL1VH1-VHG56F | 2.3E+05 | 2.2E−02 | 9.8E−08 | 2.3 |
| 202 | AS170036 VL1VH1-VHS57R | 2.0E+05 | 1.7E−02 | 8.8E−08 | 2.8 |
| 203 | AS170036 VL1VH1-VHS57Q | 2.1E+05 | 2.2E−02 | 1.0E−07 | 2.4 |
| 204 | AS170036 VL1VH1-VHS57M | 2.8E+05 | 2.5E−02 | 9.0E−08 | 2.7 |
| 205 | AS170036 VL1VH1-VHS57K | 1.5E+05 | 8.1E−03 | 5.6E−08 | 4.4 |
| 206 | AS170036 VL1VH1-VHS57H | 1.7E+05 | 6.1E−03 | 3.5E−08 | 6.9 |
| 207 | AS170036 VL1VH1-VHG108S | 2.7E+05 | 2.6E−02 | 9.6E−08 | 2.8 |
| 208 | AS170036 VL1VH1-VHG108N | 3.3E+05 | 4.5E−02 | 1.4E−07 | 2.0 |
| 209 | AS170036 VL1VH1-VHG108M | 2.2E+05 | 1.3E−02 | 5.8E−08 | 4.7 |
| 210 | AS170036 VL1VH1-VHG108E | 3.5E+05 | 2.0E−02 | 5.6E−08 | 4.1 |
| 211 | AS170036 VL1VH1-VHG108D | 3.7E+05 | 1.5E−02 | 4.2E−08 | 5.5 |
| 212 | AS170036 VL1VH1-VHG108A | 2.9E+05 | 1.2E−02 | 4.2E−08 | 5.5 |

[0684] Of all 22 mutations, 11 mutations listed in FIG. 23 were selected for combination. Double and triple mutations were carried out according to the design of Tables 15 and 16, and Table 17, respectively. Altogether there are 84 double and triple mutations. The crude scFv muteins were then subjected to SPR affinity measurement by the method mentioned above. As shown in Table 18, the double muteins have affinity increase ranging from 5.6 to 48.1 fold, whereas the triple mutations further improve the binding affinity to AFP158/HLA-A*02:01 (Table 19, affinity increase ranging from 10.9 to 212.3 fold).

TABLE 15
Double mutations of AS170036 VL1VH1

| | Site 2 | | |
|---|---|---|---|
| Site 1 | VLH98F | VLH98I | VLH98Q |
| VHG56Y | 01-AS170036 | 02-AS170036 | 03-AS170036 |
| | VL1VH1-56Y98F | VL1VH1-56Y98I | VL1VH1-56Y98Q |
| VHG56N | 04-AS170036 | 05-AS170036 | 06-AS170036 |
| | VL1VH1-56N98F | VL1VH1-56N98I | VL1VH1-56N98Q |
| VHS57H | 07-AS170036 | 08-AS170036 | 09-AS170036 |
| | VL1VH1-57H98F | VL1VH1-57H98I | VL1VH1-57H98Q |
| VHS57K | 10-AS170036 | 11-AS170036 | 12-AS170036 |
| | VL1VH1-57K98F | VL1VH1-57K98I | VL1VH1-57K98Q |
| VHS57M | 13-AS170036 | 14-AS170036 | 15-AS170036 |
| | VL1VH1-57M98F | VL1VH1-57M98I | VL1VH1-57M98Q |

TABLE 16
Double mutations of AS170036 VL1VH1

| | Site 2 | | |
|---|---|---|---|
| Site 1 | VHG108A | VHG108D | VHG108S |
| VHG56Y | 16-AS170036 VL1VH1- | 17-AS170036 VL1VH1- | 18-AS170036 VL1VH1- |
| | 56Y108A | 56Y108D | 56Y108S |
| VHG56N | 19-AS170036 VL1VH1- | 20-AS170036 VL1VH1- | 21-AS170036 VL1VH1- |
| | 56N108A | 56N108D | 56N108S |
| VHS57H | 22-AS170036 VL1VH1- | 23-AS170036 VL1VH1- | 24-AS170036 VL1VH1- |
| | 57H108A | 57H108D | 57H108S |
| VHS57K | 25-AS170036 VL1VH1- | 26-AS170036 VL1VH1- | 27-AS170036 VL1VH1- |
| | 57K108A | 57K108D | 57K108S |
| VHS57M | 28-AS170036 VL1VH1- | 29-AS170036 VL1VH1- | 30-AS170036 VL1VH1- |
| | 57M108A | 57M108D | 57M108S |
| VLH98F | 31-AS170036 VL1VH1- | 32-AS170036 VL1VH1- | 33-AS170036 VL1VH1- |
| | 98F108A | 98F108D | 98F108S |
| VLH98I | 34-AS170036 VL1VH1- | 35-AS170036 VL1VH1- | 36-AS170036 VL1VH1- |
| | 98I108A | 98I108D | 98I108S |
| VLH98Q | 37-AS170036 VL1VH1- | 38-AS170036 VL1VH1- | 39-AS170036 VL1VH1- |
| | 98Q108A | 98Q108D | 98Q108S |

TABLE 17
Triple mutations of AS170036 VL1VH1

| | Site 3 | | |
|---|---|---|---|
| Site1, 2 | VHG108A | VHG108D | VHG108S |
| 56Y98F | 40-AS170036 VL1VH1- | 41-AS170036 VL1VH1- | 42-AS170036 VL1VH1- |
| | 56Y98F108A | 56Y98F108D | 56Y98F108S |
| 56Y98I | 43-AS170036 VL1VH1- | 44-AS170036 VL1VH1- | 45-AS170036 VL1VH1- |
| | 56Y98I108A | 56Y98I108D | 56Y98I108S |
| 56Y98Q | 46-AS170036 VL1VH1- | 47-AS170036 VL1VH1- | 48-AS170036 VL1VH1- |
| | 56Y98Q108A | 56Y98Q108D | 56Y98Q108S |
| 56N98F | 49-AS170036 VL1VH1- | 50-AS170036 VL1VH1- | 51-AS170036 VL1VH1- |
| | 56N98F108A | 56N98F108D | 56N98F108S |
| 56N98I | 52-AS170036 VL1VH1- | 53-AS170036 VL1VH1- | 54-AS170036 VL1VH1- |
| | 56N98I108A | 56N98I108D | 56N98I108S |
| 56N98Q | 55-AS170036 VL1VH1- | 56-AS170036 VL1VH1- | 57-AS170036 VL1VH1- |
| | 56N98Q108A | 56N98Q108D | 56N98Q108S |
| 57H98F | 58-AS170036 VL1VH1- | 59-AS170036 VL1VH1- | 60-AS170036 VL1VH1- |
| | 57H98F108A | 57H98F108D | 57H98F108S |
| 57H98I | 61-AS170036 VL1VH1- | 62-AS170036 VL1VH1- | 63-AS170036 VL1VH1- |
| | 57H98I108A | 57H98I108D | 57H98I108S |
| 57H98Q | 64-AS170036 VL1VH1- | 65-AS170036 VL1VH1- | 66-AS170036 VL1VH1- |
| | 57H98Q108A | 57H98Q108D | 57H98Q108S |
| 57K98F | 67-AS170036 VL1VH1- | 68-AS170036 VL1VH1- | 69-AS170036 VL1VH1- |
| | 57K98F108A | 57K98F108D | 57K98F108S |
| 57K98I | 70-AS170036 VL1VH1- | 71-AS170036 VL1VH1- | 72-AS170036 VL1VH1- |
| | 57K98I108A | 57K98I108D | 57K98I108S |
| 57K98Q | 73-AS170036 VL1VH1- | 74-AS170036 VL1VH1- | 75-AS170036 VL1VH1- |
| | 57K98Q108A | 57K98Q108D | 57K98Q108S |
| 57M98F | 76-AS170036 VL1VH1- | 77-AS170036 VL1VH1- | 78-AS170036 VL1VH1- |
| | 57M98F108A | 57M98F108D | 57M98F108S |
| 57M98I | 79-AS170036 VL1VH1- | 80-AS170036 VL1VH1- | 81-AS170036 VL1VH1- |
| | 57M98I108A | 57M98I108D | 57M98I108S |
| 57M98Q | 82-AS170036 VL1VH1- | 83-AS170036 VL1VH1- | 84-AS170036 VL1VH1- |
| | 57M98Q108A | 57M98Q108D | 57M98Q108S |

TABLE 18
Monovalent binding affinity of AS170036 VL1VH1 double muteins

| SEQ ID | | ka | kd | KD | Affinity |
|---|---|---|---|---|---|
| NO. | Ligand | (1/Ms) | (1/s) | (M) | increase |
| 183 | AS170036 VL1VH1 | 4.9E+05 | 1.1E−01 | 2.3E−07 | 1 |
| 213 | 01-AS170036 VL1VH1-56Y98F | 2.2E+05 | 2.3E−03 | 1.1E−08 | 21.0 |
| 214 | 02-AS170036 VL1VH1-56Y98I | 2.1E+05 | 1.4E−03 | 6.7E−09 | 33.5 |
| 215 | 03-AS170036 VL1VH1-56Y98Q | 1.9E+05 | 1.6E−03 | 8.7E−09 | 25.8 |
| 216 | 04-AS170036 VL1VH1-56N98F | 3.6E+05 | 9.7E−03 | 2.7E−08 | 8.2 |
| 217 | 05-AS170036 VL1VH1-56N98I | 2.7E+05 | 5.6E−03 | 2.1E−08 | 10.7 |
| 218 | 06-AS170036 VL1VH1-56N98Q | 2.5E+05 | 5.8E−03 | 2.3E−08 | 9.7 |
| 219 | 07-AS170036 VL1VH1-57H98F | 2.4E+05 | 1.8E−03 | 7.4E−09 | 30.2 |
| 220 | 08-AS170036 VL1VH1-57H98I | 2.0E+05 | 3.6E−03 | 1.8E−08 | 12.6 |
| 221 | 09-AS170036 VL1VH1-57H98Q | 1.9E+05 | 1.7E−03 | 9.1E−09 | 24.8 |
| 222 | 10-AS170036 VL1VH1-57K98F | 2.1E+05 | 4.0E−03 | 1.9E−08 | 11.8 |
| 223 | 11-AS170036 VL1VH1-57K98I | 1.6E+05 | 4.0E−03 | 2.5E−08 | 9.1 |
| 224 | 12-AS170036 VL1VH1-57K98Q | 1.6E+05 | 2.5E−03 | 1.6E−08 | 13.9 |
| 225 | 13-AS170036 VL1VH1-57M98F | 3.6E+05 | 8.7E−03 | 2.4E−08 | 9.3 |
| 226 | 14-AS170036 VL1VH1-57M98I | 3.1E+05 | 1.3E−02 | 4.0E−08 | 5.6 |
| 227 | 15-AS170036 VL1VH1-57M98Q | 2.4E+05 | 6.7E−03 | 2.8E−08 | 8.0 |
| 228 | 16-AS170036 VL1VH1-56Y108A | 2.0E+05 | 9.3E−04 | 4.7E−09 | 48.1 |
| 229 | 17-AS170036 VL1VH1-56Y108D | 2.0E+05 | 1.2E−03 | 6.0E−09 | 37.3 |
| 230 | 18-AS170036 VL1VH1-56Y108S | 1.4E+05 | 1.7E−03 | 1.2E−08 | 19.2 |
| 231 | 19-AS170036 VL1VH1-56N108A | 2.4E+05 | 3.6E−03 | 1.5E−08 | 14.9 |
| 232 | 20-AS170036 VL1VH1-56N108D | 2.7E+05 | 4.6E−03 | 1.7E−08 | 13.2 |
| 233 | 21-AS170036 VL1VH1-56N108S | 2.1E+05 | 6.7E−03 | 3.2E−08 | 7.0 |
| 234 | 22-AS170036 VL1VH1-57H108A | 2.1E+05 | 1.4E−03 | 6.9E−09 | 32.5 |
| 235 | 23-AS170036 VL1VH1-57H108D | 2.1E+05 | 2.0E−03 | 9.6E−09 | 23.5 |
| 236 | 24-AS170036 VL1VH1-57H108S | 1.4E+05 | 2.2E−03 | 1.6E−08 | 14.2 |
| 237 | 25-AS170036 VL1VH1-57K108A | 1.8E+05 | 1.8E−03 | 1.0E−08 | 22.5 |
| 238 | 26-AS170036 VL1VH1-57K108D | 1.9E+05 | 2.2E−03 | 1.2E−08 | 18.9 |
| 239 | 27-AS170036 VL1VH1-57K108S | 1.2E+05 | 2.6E−03 | 2.2E−08 | 10.1 |
| 240 | 28-AS170036 VL1VH1-57M108A | 2.4E+05 | 4.0E−03 | 1.7E−08 | 13.6 |
| 241 | 29-AS170036 VL1VH1-57M108D | 2.9E+05 | 5.5E−03 | 1.9E−08 | 11.8 |
| 242 | 30-AS170036 VL1VH1-57M108S | 2.0E+05 | 6.7E−03 | 3.3E−08 | 6.8 |
| 243 | 31-AS170036 VL1VH1-98F108A | 3.3E+05 | 3.9E−03 | 1.2E−08 | 19.1 |
| 244 | 32-AS170036 VL1VH1-98F108D | 4.5E+05 | 5.7E−03 | 1.3E−08 | 17.6 |
| 245 | 33-AS170036 VL1VH1-98F108S | 3.3E+05 | 8.6E−03 | 2.6E−08 | 8.6 |
| 246 | 34-AS170036 VL1VH1-98I08A | 2.8E+05 | 3.1E−03 | 1.1E−08 | 20.1 |
| 247 | 35-AS170036 VL1VH1-98I108D | 3.7E+05 | 5.3E−03 | 1.4E−08 | 15.8 |
| 248 | 36-AS170036 VL1VH1-98I108S | 2.4E+05 | 7.0E−03 | 2.9E−08 | 7.7 |
| 249 | 37-AS170036 VL1VH1-98Q108A | 2.5E+05 | 2.8E−03 | 1.1E−08 | 20.5 |
| 250 | 38-AS170036 VL1VH1-98Q108D | 3.3E+05 | 4.5E−03 | 1.4E−08 | 16.3 |
| 251 | 39-AS170036 VL1VH1-98Q108S | 2.2E+05 | 5.7E−03 | 2.7E−08 | 8.5 |

TABLE 19
Monovalent binding affinity of AS170036 VL1VH1 triple muteins

| SEQ ID | | ka | kd | KD | Affinity |
|---|---|---|---|---|---|
| NO. | Ligand | (1/Ms) | (1/s) | (M) | increase |
| 183 | AS170036 VL1VH1 | 4.9E+05 | 1.1E−01 | 2.3E−07 | 1 |
| 252 | 40-AS170036 VL1VH1-56Y98F108A | 2.4E+05 | 3.8E−04 | 1.6E−09 | 141.5 |
| 253 | 41-AS170036 VL1VH1-56Y98F108D | 2.7E+05 | 5.4E−04 | 2.0E−09 | 110.3 |
| 254 | 42-AS170036 VL1VH1-56Y98F108S | 1.9E+05 | 7.4E−04 | 4.0E−09 | 56.3 |
| 255 | 43-AS170036 VL1VH1-56Y98I108A | 2.4E+05 | 2.5E−04 | 1.1E−09 | 212.3 |
| 256 | 44-AS170036 VL1VH1-56Y98I108D | 2.6E+05 | 3.8E−04 | 1.5E−09 | 152.0 |
| 257 | 45-AS170036 VL1VH1-56Y98I108S | 1.8E+05 | 5.0E−04 | 2.8E−09 | 81.5 |
| 258 | 46-AS170036 VL1VH1-56Y98Q108A | 2.3E+05 | 2.8E−04 | 1.2E−09 | 182.9 |
| 259 | 47-AS170036 VL1VH1-56Y98Q108D | 2.4E+05 | 4.4E−04 | 1.8E−09 | 122.3 |
| 260 | 48-AS170036 VL1VH1-56Y98Q108S | 1.6E+05 | 5.5E−04 | 3.3E−09 | 67.4 |
| 261 | 49-AS170036 VL1VH1-56N98F108A | 2.7E+05 | 1.5E−03 | 5.4E−09 | 41.7 |
| 262 | 50-AS170036 VL1VH1-56N98F108D | 3.1E+05 | 1.9E−03 | 6.2E−09 | 36.4 |
| 263 | 51-AS170036 VL1VH1-56N98F108S | 2.1E+05 | 2.8E−03 | 1.3E−08 | 17.6 |
| 264 | 52-AS170036 VL1VH1-56N98I108A | 2.6E+05 | 9.3E−04 | 3.6E−09 | 62.0 |
| 265 | 53-AS170036 VL1VH1-56N98I108D | 2.8E+05 | 1.4E−03 | 5.1E−09 | 44.4 |
| 266 | 54-AS170036 VL1VH1-56N98I108S | 1.9E+05 | 1.9E−03 | 1.0E−08 | 22.3 |
| 267 | 55-AS170036 VL1VH1-56N98Q108A | 2.4E+05 | 1.0E−03 | 4.2E−09 | 54.1 |
| 268 | 56-AS170036 VL1VH1-56N98Q108D | 2.6E+05 | 1.5E−03 | 5.8E−09 | 39.1 |
| 269 | 57-AS170036 VL1VH1-56N98Q108S | 1.8E+05 | 1.9E−03 | 1.1E−08 | 20.8 |
| 270 | 58-AS170036 VL1VH1-57H98F108A | 2.6E+05 | 4.0E−04 | 1.5E−09 | 146.1 |
| 271 | 59-AS170036 VL1VH1-57H98F108D | 2.9E+05 | 5.3E−04 | 1.8E−09 | 123.6 |
| 272 | 60-AS170036 VL1VH1-57H98F108S | 2.0E+05 | 6.8E−04 | 3.4E−09 | 66.2 |
| 273 | 61-AS170036 VL1VH1-57H98I108A | 2.3E+05 | 7.6E−04 | 3.3E−09 | 67.6 |
| 274 | 62-AS170036 VL1VH1-57H98I108D | 2.5E+05 | 1.2E−03 | 4.9E−09 | 45.9 |
| 275 | 63-AS170036 VL1VH1-57H98I108S | 1.6E+05 | 1.4E−03 | 8.5E−09 | 26.4 |
| 276 | 64-AS170036 VL1VH1-57H98Q108A | 2.3E+05 | 4.1E−04 | 1.8E−09 | 127.8 |
| 277 | 65-AS170036 VL1VH1-57H98Q108D | 2.5E+05 | 6.3E−04 | 2.5E−09 | 90.7 |
| 278 | 66-AS170036 VL1VH1-57H98Q108S | 1.6E+05 | 6.5E−04 | 4.0E−09 | 56.3 |
| 279 | 67-AS170036 VL1VH1-57K98F108A | 2.3E+05 | 7.9E−04 | 3.5E−09 | 64.3 |
| 280 | 68-AS170036 VL1VH1-57K98F108D | 2.5E+05 | 1.0E−03 | 4.1E−09 | 54.5 |
| 281 | 69-AS170036 VL1VH1-57K98F108S | 1.6E+05 | 1.4E−03 | 8.3E−09 | 27.0 |
| 282 | 70-AS170036 VL1VH1-57K98I108A | 1.9E+05 | 8.2E−04 | 4.3E−09 | 52.6 |
| 283 | 71-AS170036 VL1VH1-57K98I108D | 2.1E+05 | 1.2E−03 | 5.8E−09 | 38.7 |
| 284 | 72-AS170036 VL1VH1-57K98I108S | 1.2E+05 | 1.3E−03 | 1.1E−08 | 21.0 |
| 285 | 73-AS170036 VL1VH1-57K98Q108A | 1.9E+05 | 5.3E−04 | 2.8E−09 | 80.4 |
| 286 | 74-AS170036 VL1VH1-57K98Q108D | 2.0E+05 | 7.7E−04 | 3.8E−09 | 58.7 |
| 287 | 75-AS170036 VL1VH1-57K98Q108S | 1.3E+05 | 8.6E−04 | 6.8E−09 | 33.0 |
| 288 | 76-AS170036 VL1VH1-57M98F108A | 2.6E+05 | 1.3E−03 | 5.2E−09 | 43.4 |
| 289 | 77-AS170036 VL1VH1-57M98F108D | 2.8E+05 | 1.8E−03 | 6.2E−09 | 36.2 |
| 290 | 78-AS170036 VL1VH1-57M98F108S | 1.9E+05 | 2.4E−03 | 1.3E−08 | 18.0 |
| 291 | 79-AS170036 VL1VH1-57M98I108A | 2.2E+05 | 1.8E−03 | 8.1E−09 | 28.0 |
| 292 | 80-AS170036 VL1VH1-57M98I108D | 2.6E+05 | 2.9E−03 | 1.1E−08 | 20.5 |
| 293 | 81-AS170036 VL1VH1-57M98I108S | 1.7E+05 | 3.5E−03 | 2.1E−08 | 10.9 |
| 294 | 82-AS170036 VL1VH1-57M98Q108A | 2.2E+05 | 1.2E−03 | 5.2E−09 | 43.0 |
| 295 | 83-AS170036 VL1VH1-57M98Q108D | 2.4E+05 | 1.8E−03 | 7.6E−09 | 29.6 |
| 296 | 84-AS170036 VL1VH1-57M98Q108S | 1.6E+05 | 2.1E−03 | 1.4E−08 | 16.7 |

[0685] The 84 muteins were then tested for their selectivity. The 12 recombinant AFP158 homologous peptides/HLA-A*02:01 complex were mixed in three groups (group 1: ZNF566 and ARNTL, group 2: CDC14A, PTP4A1, BRCA2 and RCL1, group 3: OR1I1, OR51B6, OR6C1, ATG9A, RP1 and NR2E1). The binding of the 84 antibodies to these complexes were then measured by method described above. As the binding affinity increases, the selectivity of most muteins is sacrificed (data not shown). The SPR binding level of 20 representative muteins with affinity increase from 8.0 to 212.3 fold were summarized in Table 20. Compared to the binding response to AFP158/HLA-A*02:01 complex, some muteins (SEQ ID NOs: 217, 222, 227, 231, 237, 239 and 246) shows low or no binding to AFP158 homologous peptides/HLA-A*02:01 complexes (all below 15 RU), indicating good selectivity to AFP158.

TABLE 20
SPR binding level of 20 AS170036 VLIVH1 double and triple muteins to
AFP158 and AFP158 homologous peptide/HLA-A*02:01 complexes

| SEQ ID | | | | | |
|---|---|---|---|---|---|
| NO. | Ligand | AFP158 | group 1^{a} | group 2^{b} | group 3^{c} |
| 183 | AS170036 VL1VH1 | 195.9 | 0.8 | 0.4 | 0.2 |
| 215 | 03-AS170036 VL1VH1- | 738.0 | 4.0 | 27.2 | 2.4 |
| | 56Y98Q | | | | |
| 217 | 05-AS170036 VL1VH1- | 563.9 | 4.4 | 7.0 | 2.0 |
| | 56N98I | | | | |
| 222 | 10-AS170036 VL1VH1- | 614.3 | 6.8 | 4.0 | 1.0 |
| | 57K98F | | | | |
| 227 | 15-AS170036 VL1VH1- | 554.4 | 5.1 | 2.8 | 1.2 |
| | 57M98Q | | | | |
| 228 | 16-AS170036 VL1VH1- | 600.8 | 4.5 | 32.6 | 3.2 |
| | 56Y108A | | | | |
| 231 | 19-AS170036 VL1VH1- | 525.5 | 5.0 | 7.5 | 2.6 |
| | 56N108A | | | | |
| 234 | 22-AS170036 VL1VH1- | 571.3 | 26.6 | 10.0 | 5.7 |
| | 57H108A | | | | |
| 237 | 25-AS170036 VL1VH1- | 554.4 | 10.9 | 6.3 | 2.0 |
| | 57K108A | | | | |
| 239 | 27-AS170036 VL1VH1- | 626.7 | 6.1 | 3.3 | 1.3 |
| | 57K108S | | | | |
| 246 | 34-AS170036 VL1VH1- | 559.4 | 10.2 | 11.2 | 3.6 |
| | 98I108A | | | | |
| 252 | 40-AS170036 VL1VH1- | 586.6 | 13.8 | 79.2 | 9.5 |
| | 56Y98F108A | | | | |
| 254 | 42-AS170036 VL1VH1- | 681.9 | 6.3 | 39.3 | 4.4 |
| | 56Y98F108S | | | | |
| 255 | 43-AS170036 VL1VH1- | 664.4 | 25.7 | 148.3 | 17.3 |
| | 56Y98I108A | | | | |
| 257 | 45-AS170036 VL1VH1- | 688.8 | 9.0 | 64.7 | 6.0 |
| | 56Y98I108S | | | | |
| 260 | 48-AS170036 VL1VH1- | 817.1 | 9.3 | 56.6 | 6.1 |
| | 56Y98Q108S | | | | |
| 261 | 49-AS170036 VL1VH1- | 604.0 | 15.3 | 21.1 | 6.5 |
| | 56N98F108A | | | | |
| 279 | 67-AS170036 VL1VH1- | 685.5 | 35.8 | 22.3 | 6.3 |
| | 57K98F108A | | | | |
| 282 | 70-AS170036 VL1VH1- | 807.1 | 33.7 | 21.9 | 5.8 |
| | 57K98I108A | | | | |
| 287 | 75-AS170036 VL1VH1- | 819.2 | 22.6 | 14.3 | 3.9 |
| | 57K98Q108S | | | | |
| 294 | 82-AS170036 VL1VH1- | 662.1 | 28.2 | 16.6 | 4.7 |
| | 57M98Q108A | | | | |

^{a}group 1: ZNF566 and ARNTL
^{b}group 2: CDC14A, PTP4A1, BRCA2 and RCL1
^{c}group 3: OR1I1, OR51B6, OR6C1, ATG9A, RP1 and NR2E1

### Example 7. Cross-Reactivity of AFP158 Specific Antibodies Against Multiple HLA-A*02 Alleles

[0686] The function of MHC molecules is to bind peptide fragments derived from pathogens and present them on the cell surface to T cells. MHC is polygenic and polymorphic, making it difficult for pathogens to evade immune surveillance. In humans, MHCI molecules consist of 3 main genes, HLA-A, -B, -C (polygenic). And there are multiple variants, or alleles, of each gene within the population as a whole (polymorphic). For example, HLA-A is divided into different alleles such as HLA-A*01, A*02, A*03, etc. For the HLA-A*02 alleles, there are multiple subtypes, such as HLA-A*02:01, A*02:02, A*02:03, etc. Between the different subtypes of HLA-A*02 group, the sequence differences are limited to only several amino acids. So in many cases, peptides that bind to HLA-A*02:01 can also form complexes with multiple subtypes of the HLA-A*02 allele.

[0687] As is shown in FIG. 24, although HLA-A*02:01 is the dominant HLA-A02 subtype in worldwide population, in Asia and Africa, A*02:02, A*02:03, A*02:05, A*02:06, A*02:07, A*02:011 are also common HLA-A*02 subtypes. The ability of AFP158 antibodies to recognize not only AFP158 peptide in the context of HLA-A*02:01, but also other subtypes of HLA-A*02, will broaden the patient population that might benefit from AFP158-targeted therapy. We therefore generate recombinant AFP158/MHCI complexes with 6 other subtypes of the HLA-A*02 allele and measured the binding affinity of AFP158/HLA-A*02:01-specific antibodies to these complexes by method described in Example 4. As is shown in FIG. 25, camel and humanized AS170036, AS179723, AS179732 and AS190259 were able to recognize AFP158 bound to multiple subtype of the HLA-A*02 allele. Affinity-matured AS170036 VL1VH1 muteins also showed binding to AFP158 bound to multiple subtype of the HLA-A*02 allele complexes (FIG. 26).

### Example 8. Bispecific T Cell Engager (BiTE)-Redirected Cell Killing

### BiTE (Bispecific T Cell Engager) Production

[0688] The BsAbs comprise two functional moieties: the first is the scFv targeting AFP158/HLA-A*02:01 for antigen recognition, the second is a mouse OKT3 scFv targeting human CD3F for T cell engaging. The AFP158/HLA-A*02:01-targeting scFv and OKT3 scFv were connected by a GGGGS linker. A C-terminal 6×histamine tag was used for protein purification and detection. The BiTE format of AS170036-TCE (SEQ ID NO: 297), AS170036 VL1VH1-TCE (SEQ ID NO: 298), AS179723-TCE (SEQ ID NO: 299), AS179732-TCE (SEQ ID NO: 300), Blinatumomab-TCE control (SEQ ID NO: 301) and ET1402L1-TCE control (SEQ ID NO: 434) were expressed as described in Example 4. The BsAbs were purified using Ni-NTA Agarose column (Genscript, Cat: L00250).

### Target and Control Cell Lines

[0689] To select appropriate target and control cell lines for killing assay, mRNA levels of AFP and 12 protein containing AFP158 homologous peptides (i.e. ARNTL, ATG9A, BRCA2, CDC14A, NR2E1, OR1I1, OR51B6, OR6C1, PTP4A1, RP1, RCL1, ZNF566) in several HLA-A*02:01 positive cell lines were measured by real-time RT-PCR. The assay was carried out using SYBR® Green Real-time PCR Master Mix (TYOBO, Cat. No: QPK-201CH) and ABI 7500 according to manufacturers' manuals. mRNA levels of house-keeping gene Beta actin were used as internal control. As shown in FIG. 27, HepG2 (AFP and HLA-A*02:01 positive) can be used as target cell line. SK-HEP-1, MCF-7 and HEK293 are negative for AFP and positive for many of the AFP158 homologous peptide-containing proteins and HLA-A*02:01, thus can be selected as control cell lines. MJ is negative for both HLA-A*02:01 and AFP, thus can also be selected as a control cell line (cell line database).

### BiTE-Redirected Cell Killing

[0690] T cell directed cytotoxicity towards the aforementioned tumor cell lines and peptide-loaded T2 cells was assayed by LDH (Roche, Cat: 11644793001). Briefly, human T cells were isolated from PBMC (Hemacare), activated and expanded with T cell activation/expansion kit (Miltenyi Biotec, Cat: 130-091-441). Activated T cells were cultured and maintained in AIMV medium with 5% FBS plus 300 IU/ml IL-2, and used at day 5-10. Activated T cells (Effector cells) and target cells were co-cultured at 5:1 ratio with different concentrations of BsAb for 16 hours. Cytotoxicity was determined by measuring LDH activity in culture supernatants.

[0691] In the presence of AFP158 BsAbs, activated T cells killed cancer cells in an AFP and HLA-A*02:01-dependent manner. Among all cell lines tested, T cells killed HepG2 most effectively. Little or no cytotoxicity was observed for cell lines that were tested AFP negative and HLA-A*02:01 positive (i.e. SK-HEP-1, MCF-7 and HEK 293) under the same experimental conditions (FIG. 10A-10F).

[0692] To further assess the selectivity of the BsAbs, selected BsAbs were tested for T-cell redirected killing to T2 cells loaded with 12 AFP158 homologous peptides and 50 human irrelevant self-peptides. The functional activity of selected BsAbs was summarized in FIGS. 11A-11E. The selected BsAbs show effective killing to AFP158/T2 cells at 1 pM antibody concentration (>80% cell killing) and little or no cytotoxicity towards other peptide-loaded T2 cells (<20% cell killing). However, as ET1402L1 cross-reacts with one of PTP4A1 peptide presented on HLA-A*02:01 (FIG. 5A), >60% of PTP4A1-pulsed T2 cells were killed at 1 pM (FIG. 11E).

### Example 9. BiTE-HLE (Half-Life Extending)-Redirected Cell Killing

### BiTE-HLE Production

[0693] BiTE-HLE comprises three functional moieties: the first is the scFv targeting AFP158/HLA-A*02:01 for antigen recognition, the second is a humanized I2C scFv targeting human CD3F for T cell engaging, the third moiety is a single chain human crystallizable fragment (scFc) for antibody half-life extension in vivo. Humanized (SEQ ID NOs: 302-306) or affinity-matured (SEQ ID NOs: 307-331) anti-AFP158/HLA-A*02:01 antibodies and ET1402L1 control (SEQ ID NO: 435) were used to construct BiTE-HLE format of BsAbs. These BsAbs were expressed as described in Example 4, and purified using Protein A Agarose column (Genscript, Cat: L00464), followed by size-exclusion chromatography (Citiva, HiLoad® 16/600 Superdex® 200 pg, cat: GE28-9893-35).

### BiTE-HLE-Redirected Cell Killing

[0694] T cell directed cytotoxicity towards the aforementioned tumor cell lines and peptide-loaded T2 cells was assayed by method mentioned above. For 4 humanized antibodies and 1 camel antibody AS148691, among all cell lines tested, T cells killed HepG2 most effectively. Little or no cytotoxicity was observed for control cell lines (i.e. SK-HEP-1, MCF-7, HEK 293 and MJ) under the same experimental conditions (FIG. 12A-12E). The functional selectivity of BsAbs was summarized in FIG. 13A-13F. The BsAbs show effective killing of AFP158/T2 cells at 1 nM antibody concentration (>60% cell killing) except for AS190259 VL1VH1-TCE-HLE (˜40% cell killing) and little or no cytotoxicity towards other peptide-loaded T2 cells (<20% cell killing). Again, ˜80% of PTP4A1-pulsed T2 cells were killed in the presence of 1 nM ET1402L1 (FIG. 13F). For 25 affinity-matured antibodies, among all cell lines tested, T cells killed HepG2 most effectively. Little or no cytotoxicity was observed for control cell lines (i.e. SK-HEP-1, MCF-7, HEK 293 and MJ) under the same experimental conditions (data not all shown). The result of 12 representative antibodies were summarized in FIG. 14A-14L. The functional selectivity of the 12 BsAbs was summarized in FIG. 15A-15L. The BsAbs show effective killing of AFP158/T2 cells at 1 nM antibody concentration (>60% cell killing) and little or no cytotoxicity towards other peptide-loaded T2 cells (<20% cell killing) except for AS170036 VL1VH1-56Y98I108S-TCE-HLE (>20% cell killing for BRCA2/T2 and CDC14A/T2) and AS170036 VL1VH1-56Y98Q108S-TCE-HLE (>20% cell killing for BRCA2/T2).

### Example 10. TCE-KIH (Knobs-into-Holes)-Redirected Cell Killing

### TCE-KIH Production

[0695] The TCE-KIH BsAb comprises three chains. Correct pairing of heavy chains is achieved through knobs-into-holes technology. Fc CH2 regions in Chains 1 and 2 contain Ala, Ala substitutions (L234A/L235A) to markedly reduce or eliminate FcγR and complement binding, while maintaining neonatal FcR (FcRn) binding to take advantage of the IgG salvage pathway mediated by this receptor. Chain 1 is the heavy chain of CD3 arm with a structure of VH-CH1-hinge-CH2-CH3 (with L234A/L235A, T366W constant region mutation) (SEQ ID NO: 332). Chain 3 is the light chain of CD3 arm with a structure of VL-CL (SEQ ID NO: 333). Chain 2 is the AFP158 arm with 2 tandem repeat sdAbs targeting AFP158/HLA-A*02:01. The structure of chain 2 is sdAb-sdAb-hinge-CH2-CH3 (with L234A/L235A, T366S/L368A/Y407V constant region mutations) (SEQ ID NOs: 334 and 335). These BsAbs were expressed as described in Example 4. The BsAbs were purified using Protein L Agarose column (Genscript, Cat: L00239).

### TCE-KIH-Redirected Cell Killing

[0696] T cell directed cytotoxicity towards the aforementioned tumor cell lines and peptide-loaded T2 cells was assayed by method mentioned above. In the presence of AFP158 BsAbs, activated T cells killed cancer cells in an AFP and HLA-A*02:01-dependent manner. Among all cell lines tested, T cells killed HepG2 most effectively. Little or no cytotoxicity was observed for control cell lines (i.e. SK-HEP-1, MCF-7, HEK 293 and MJ) under the same experimental conditions (FIG. 16A-16B). The functional selectivity of the BsAbs was summarized in FIG. 17A-17B. AS167821A-AS167821A-TCE-KIH (SEQ ID NOs: 332, 333 and 334) shows effective killing of AFP158/T2 cells at 1 nM antibody concentration (˜60% cell killing) and little or no cytotoxicity towards other peptide-loaded T2 cells (<20% cell killing). Whereas, AS167830A-AS167830A-TCE-KIH (SEQ ID NOs: 332, 333 and 335) shows less than 20% killing to AFP158/T2 cells at 1 nM antibody concentration.

### Example 11. Methods for the Generation of AFP CAR-T

### Generation of AFP-CAR Construct

[0697] The CAR molecules were constructed by sequentially fusing CD8 signaling peptide, a single-chain variable fragment (scFv) of antibody, CD8 hinge, CD8 transmembrane domain, 4-1BB co-stimulatory domain and CD3ζ intracellular domain. The nucleic acids encoding the CAR polypeptides are cloned into a lentiviral vector under the control of an EF1α promoter. Specifically, a lentiviral vector was modified using pLVX-Puro (Clontech #632164) by replacing the original promoter with human elongation factor 1α promoter (hEF1α) and depleted the puromycin resistance gene with a with EcoRI and BamHI.

### Generation of AFP-CAR Lentivirus

[0698] A lentivirus packaging plasmid mixture including pMDLg/pRRE (Addgene #12251), pRSV-Rev (Addgene #12253), and pMD2.G (Addgene #12259) was pre-mixed with CAR construct at a pre-optimized ratio with polyetherimide (PEI), then mixed properly and incubated at room temperature for 5 minutes. The transfection mix was then added dropwise to the 293-T cells and mixed gently. Afterwards, cells were incubated overnight in a 37° C. and 5% CO₂ cell incubator. The supernatant was collected after centrifugation at 4° C., 500 g for 10 min. The lentiviral supernatant was then filtered through a 0.45 μm PES filter, and concentrated with ultracentrifugation. After centrifugation, the supernatant was carefully discarded and the virus pellet was rinsed cautiously with pre-chilled DPBS. The concentration of virus was then measured. Virus was aliquoted properly, then stored at −80° C. immediately. The virus titer was determined by functional transduction on T cell line.

### Generation of AFP-CAR T Cells

[0699] Primary T cells were purified from human PBMCs using Miltenyi Pan T cell isolation kit (Cat #130-096-535), following the product manual. The T cells were then activated for 48 hours with human T cell Activation/Expansion kit (Milteny #130-091-441). An optimal activation of T cells is accomplished by using one loaded Anti-Biotin MACSiBead Particle per two cells (bead-to-cell ratio 1:2). The pre-activated T cells were harvested and re-suspended in RPMI 1640 medium containing 300 IU/mL of IL-2, and transduced with lentivirus at MOI 5 in the presence of 8 μg/ml polybrene at 1000 g, 32° C. for 1 h. The transduced cells were incubated overnight in a 37° C. and 5% CO₂ cell incubator before replaced with fresh media. The cell density was monitored every other day, and fresh media were added if necessary. Four days after transduction, CAR-T cells were harvested and stained with FITC-conjugated anti-human IgG F(ab′)₂ antibody, or PE-conjugated HLA-A*02/AFP158 tetramer. Flow cytometry analysis was then used to confirm the expression of CAR (FIGS. 18A and 19A).

### Example 12. Assays for the Evaluation of In Vitro Activities of AFP CAR-Ts

### Cell Cytotoxicity Assay—IncuCyte Assay

[0700] Target cells HepG2, HEK293, SK-HEP-1, THP-1, U87-MG, MCF-7 or SK-BR-3 were pre-stained with CMFDA and the residual dye was washed out with DPBS. Subsequently, T cells were co-cultured with target cells at 1.25:1 of effector to target ratios (E:T) at 37° C. for 24 hours in 96 well plate in the presence of 8 μg/ml of propidium iodide. The images of the cells were acquired with the IncuCyte S3 imaging systems with phase, green and red channels. The dead target cells showed both green and red fluorescence, while the live ones only showed green. The data was analyzed and exported by IncuCyte S3 software, plotted by GraphPad Prism 6 (FIG. 18B). CAR-T cells of AS176934, AS176951, AS176992 and AS177005 had high cytotoxicity efficacy on target cell HepG2 cells, expressing both HLA-A*02 and AFP. However, they also had high non-specific killing effect on HEK293 and SK-HEP-1 cells, which are HLA-A*02 positive and AFP negative cell lines. Instead, AS170030-CAR-T and AS170036-CAR-T cells had high killing efficacy on HepG2 cells, and minimal cytotoxicity efficacy on AFP negative cell lines (FIG. 19B).

[0701] In order to test the antigen peptide specificity of AFP-CAR-T cells, T2 cells were either unpulsed, or pulsed with peptides with amino acid similar to AFP158 (pAFP), such as pBRCA2, pOR6C1, pRCL1, pOR1I1, pRP1, pATG9A, pZNF566, pARNTL, pNR2E1 and pOR51B6, before co-cultured with CAR-T cells for cell cytotoxicity analysis (FIGS. 19C-19D). The data suggested that AS170036-CAR-T cells had both high antigen selectivity and high peptide selectivity (FIGS. 19B-19D).

### Example 13 Comparison of Different AFP-CAR Formats

### Generation of AFP-CAR Constructs

[0702] In order to compare different CAR modalities on the function of AFP-CAR-T cells, the scfv of antibody AS170036 were fused with CD3F chain (AS170036-CD3F), or CD28 co-stimulatory domain and CD3ζ intracellular domain (AS170036-28Z), or CD28 and 4-1BB co-stimulatory domains and CD3ζ intracellular domain (AS170036-28BBZ), or CD28 co-stimulatory domain and CD3ζ and TLR2 intracellular domains (AS170036-28Z-T2). The nucleic acids encoding the CAR polypeptides are cloned into a lentiviral vector under the control of an EF1α promoter as described above.

### Generation of AFP-CAR Lentivirus and AFP-CAR T Cells

[0703] Lentivirus packaging and AFP-CAR T cells generation was performed as described above. The expression of CAR on the surface of T cells was confirmed by flow cytometry using FITC-conjugated anti-human IgG F(ab′)₂ antibody (FIG. 20A).

Functional Analysis of AFP-CAR T Cells with Different Format

[0704] For the short term cell cytotoxicity assay, CAR-T cells were co-cultured with HepG2 cells at 0.625:1 of effector to target ratios (E:T) at 37° C. and subjected to IncuCyte cell cytotoxicity assay. Compared with other format of CAR-T cells, AS170036-CD3F CAR-T cells had better short term killing efficacy (FIG. 20B left). For the long term cell cytotoxicity assay, CAR-T cells were co-cultured with target cells HepG2 cells at 37° C. in 6-well plate, and fresh target cells were replaced every other day. After 3 rounds of co-culture, CAR-T cells were separated and co-cultured with luciferase expressing target cells HepG2/Luc cells at 0.625:1 of effector to target ratios (E:T) for luciferase-based cell cytotoxicity assay. The residual luciferase activity were determined by ONE-Glo luciferase assay system (Promega) following the users' manual. Compared with other format of CAR-T cells, AS170036-CD3F CAR-T cells had better long term killing efficacy (FIG. 20B right).

### Example 14. Evaluation of In Vitro Activities of AFP CAR-Ts

[0705] The scfv of antibody AS148691, AS170030, AS179723, AS179723 VH1gVL1g1-N73Y, AS179732, AS179732 VH1gVL1g1-N73Y, and sdAb AS167821 were fused with CD3F chain. The nucleic acids encoding the CAR polypeptides were cloned into a lentiviral vector. The lentivirus packaging and AFP-CAR T cells generation was performed as described above. For short term cell cytotoxicity assay, CAR-T cells were co-cultured with luciferase expressing target cells HepG2/Luc cells at 1.25:1 of effector to target ratios (E:T) at 37° C. for 18 hours in 96 well plate. The luciferase assay was performed as described above. AS179723 VH1gVL1g1-N73Y CAR-T cells and AS179732 VH1gVL1g1-N73Y CAR-T cells had comparable short term killing efficacy compared with AS179723 CAR-T cells and AS179732 CAR-T cells (FIG. 21).

### Example 15. Evaluation of In Vitro Activities of AFP CAR-Ts

[0706] The scFv of antibody AS170036 VH1VL1 and its combined mutations (56Y98Q, 56N98I, 57K98F, 57M98Q, 56Y108A, 56N108A, 57H108A, 57K108A, 57K108S, 98I108A, 56Y98F108A, 56Y98F108S, 56Y98I108A, 56Y98I108S, 56Y98Q108S, 56N98F108A, 57K98F108A, 57K98I108A, 57K98Q108S, 57M98Q108A) were fused with CD3F chain as described above. The nucleic acids encoding the CAR polypeptides were cloned into a lentiviral vector. The lentivirus packaging and AFP-CAR T cells generation was performed. For short term cell cytotoxicity assay, CAR-T cells were co-cultured with luciferase expressing target cells HepG2/Luc cells at 0.5:1 of effector to target ratios (E:T) at 37° C. for 18 hours in 96 well plate. The luciferase assay was performed. In order to test the antigen specificity, CAR-T cells were co-cultured with MCF-7 cells at 0.5:1 of effector to target ratios (E:T) in assay medium (RPMI 1640 medium, no phenol red, with 1.25% FBS) at 37° C. for 18 hours in 96 well plate. After 18 hour-of co-culture, supernatant was collected for LDH assay (Roche) following the users' manual. The results suggested that the mutations of 56N98I, 57K98F, 57M98Q, 56N108A, 57K108S and 98I108A on the scFv region of AS170036 VH1VL1-CAR conferred CAR-T cells higher killing efficacy on HepG2/Luc cells without affecting the antigen specificity (FIGS. 22A-22D).

### Other Embodiments

[0707] It is to be understood that while the disclosure has been described in conjunction with the detailed description thereof, the foregoing description is intended to illustrate and not limit the scope of the disclosure, which is defined by the scope of the appended claims. Other aspects, advantages, and modifications are within the scope of the following claims.

The application's sequence listing, which the Patent Office published only in electronic form, follows.

SEQUENCE LISTING (435 sequences)

SEQ ID NO: 1 - protein, 100 aa, Homo sapiens [sequence omitted]

SEQ ID NO: 2 - protein, 300 aa, Artificial Sequence
  HLA-A*02:01 ECD-BSP
MGSHSMRYFFTSVSRPGRGEPRFIAVGYVDDTQFVRFDSDAASQRMEPRAPWIEQEGPEYWDGETRKVKAHSQTHRVDLGTLRGYYNQSEAGSHTVQRMYGCDVGSDWRFLRGYHQYAYDGKDYIALKEDLRSWTAADMAAQTTKHKWEAAHVAEQLRAYLEGTCVEWLRRYLENGKETLQRTDAPKTHMTHHAVSDHEATLRCWALSFYPAEITLTWQRDGEDQTQDTELVETRPAGDGTFQKWVAVVVPSGQEQRYTCHVQHEGLPKPLTLRWEPSSQPTIPILHHILDAQKMVWNHR

SEQ ID NO: 3 - protein, 9 aa, Artificial Sequence
  AFP158
FMNKFIYEI

SEQ ID NO: 4 - protein, 9 aa, Artificial Sequence
  ARNTL
KMNSFIDEL

SEQ ID NO: 5 - protein, 9 aa, Artificial Sequence
  ATG9A
RLIKFIYNI

SEQ ID NO: 6 - protein, 9 aa, Artificial Sequence
  BRCA2
KTNKFIYAI

SEQ ID NO: 7 - protein, 9 aa, Artificial Sequence
  CDC14A
RLNKKIYEA

SEQ ID NO: 8 - protein, 9 aa, Artificial Sequence
  NR2E1
KLNKIISEI

SEQ ID NO: 9 - protein, 9 aa, Artificial Sequence
  OR1I1
MLNPFIYSI

SEQ ID NO: 10 - protein, 9 aa, Artificial Sequence
  OR51B6
FMNPFIYSI

SEQ ID NO: 11 - protein, 9 aa, Artificial Sequence
  OR6C1
MMNPFIYSL

SEQ ID NO: 12 - protein, 9 aa, Artificial Sequence
  PTP4A1
TLNKFIEEL

SEQ ID NO: 13 - protein, 9 aa, Artificial Sequence
  RCL1
ILNKFIPDI

SEQ ID NO: 14 - protein, 9 aa, Artificial Sequence
  RP1
RMNGIIYEI

SEQ ID NO: 15 - protein, 9 aa, Artificial Sequence
  ZNF566
FLKKEIYEI

SEQ ID NO: 16 - protein, 9 aa, Artificial Sequence
  HLA01
FLDEFMEAV

SEQ ID NO: 17 - protein, 9 aa, Artificial Sequence
  HLA02
MLGERLFPL

SEQ ID NO: 18 - protein, 9 aa, Artificial Sequence
  HLA03
LLAILPYYV

SEQ ID NO: 19 - protein, 9 aa, Artificial Sequence
  HLA04
YLLPAIVHI

SEQ ID NO: 20 - protein, 9 aa, Artificial Sequence
  HLA05
GLMAIAWFI

SEQ ID NO: 21 - protein, 9 aa, Artificial Sequence
  HLA06
IMLEALERV

SEQ ID NO: 22 - protein, 10 aa, Artificial Sequence
  HLA07
FLGIYTVTVV

SEQ ID NO: 23 - protein, 9 aa, Artificial Sequence
  HLA08
YMVLASPSV

SEQ ID NO: 24 - protein, 9 aa, Artificial Sequence
  HLA09
ILAKFLHWL

SEQ ID NO: 25 - protein, 9 aa, Artificial Sequence
  HLA10
KLSREIMPV

SEQ ID NO: 26 - protein, 9 aa, Artificial Sequence
  HLA11
SIIGRLLEV

SEQ ID NO: 27 - protein, 9 aa, Artificial Sequence
  HLA12
ALVGAIPSI

SEQ ID NO: 28 - protein, 9 aa, Artificial Sequence
  HLA13
FLTVFSPFM

SEQ ID NO: 29 - protein, 9 aa, Artificial Sequence
  HLA14
LLLVSLWGL

SEQ ID NO: 30 - protein, 9 aa, Artificial Sequence
  HLA15
KTWGQYWQV

SEQ ID NO: 31 - protein, 9 aa, Artificial Sequence
  HLA16
ALSPVIPLI

SEQ ID NO: 32 - protein, 9 aa, Artificial Sequence
  HLA17
ILIVMVPFL

SEQ ID NO: 33 - protein, 9 aa, Artificial Sequence
  HLA18
RLLPLLALL

SEQ ID NO: 34 - protein, 9 aa, Artificial Sequence
  HLA19
RLHDLVLPL

SEQ ID NO: 35 - protein, 9 aa, Artificial Sequence
  HLA20
VLFGLGFAI

SEQ ID NO: 36 - protein, 9 aa, Artificial Sequence
  HLA21
LLFGMTPCL

SEQ ID NO: 37 - protein, 9 aa, Artificial Sequence
  HLA22
ILNVDVFTL

SEQ ID NO: 38 - protein, 9 aa, Artificial Sequence
  HLA23
LLGATCMFV

SEQ ID NO: 39 - protein, 9 aa, Artificial Sequence
  HLA24
GMGPLLATV

SEQ ID NO: 40 - protein, 9 aa, Artificial Sequence
  HLA25
FVGEFFTDV

SEQ ID NO: 41 - protein, 9 aa, Artificial Sequence
  HLA26
KLPLDINPV

SEQ ID NO: 42 - protein, 9 aa, Artificial Sequence
  HLA27
FLMASISSS

SEQ ID NO: 43 - protein, 9 aa, Artificial Sequence
  HLA28
SLDPTTSPV

SEQ ID NO: 44 - protein, 9 aa, Artificial Sequence
  HLA29
LLFALYFSA

SEQ ID NO: 45 - protein, 9 aa, Artificial Sequence
  HLA30
RLWEPLRVV

SEQ ID NO: 46 - protein, 9 aa, Artificial Sequence
  HLA31
FITGISILL

SEQ ID NO: 47 - protein, 9 aa, Artificial Sequence
  HLA32
VQYLGMLPV

SEQ ID NO: 48 - protein, 9 aa, Artificial Sequence
  HLA33
YVTAMDLFV

SEQ ID NO: 49 - protein, 9 aa, Artificial Sequence
  HLA34
ALTPVVVTL

SEQ ID NO: 50 - protein, 9 aa, Artificial Sequence
  HLA35
FMLLTQARL

SEQ ID NO: 51 - protein, 9 aa, Artificial Sequence
  HLA36
FMSAYSGVL

SEQ ID NO: 52 - protein, 9 aa, Artificial Sequence
  HLA37
AVGSHVYSV

SEQ ID NO: 53 - protein, 9 aa, Artificial Sequence
  HLA38
MIISHLSLI

SEQ ID NO: 54 - protein, 9 aa, Artificial Sequence
  HLA39
SILDAVQRV

SEQ ID NO: 55 - protein, 9 aa, Artificial Sequence
  HLA40
YVVTWIVGA

SEQ ID NO: 56 - protein, 9 aa, Artificial Sequence
  HLA41
NLFNRYPAL

SEQ ID NO: 57 - protein, 9 aa, Artificial Sequence
  HLA42
FIDQYYSSI

SEQ ID NO: 58 - protein, 9 aa, Artificial Sequence
  HLA43
VLASPSVPL

SEQ ID NO: 59 - protein, 9 aa, Artificial Sequence
  HLA44
ILTGLNYEA

SEQ ID NO: 60 - protein, 9 aa, Artificial Sequence
  HLA45
ALIHHNTHL

SEQ ID NO: 61 - protein, 9 aa, Artificial Sequence
  HLA46
KLGASPLHV

SEQ ID NO: 62 - protein, 9 aa, Artificial Sequence
  HLA47
LLSLFSLWL

SEQ ID NO: 63 - protein, 10 aa, Artificial Sequence
  HLA48
ALWGPDPAAA

SEQ ID NO: 64 - protein, 9 aa, Artificial Sequence
  HLA49
HIAKSPFEV

SEQ ID NO: 65 - protein, 9 aa, Artificial Sequence
  HLA50
YLDELIKNT

SEQ ID NO: 66 - protein, 9 aa, Artificial Sequence
  hAFP158 A1
AMNKFIYEI

SEQ ID NO: 67 - protein, 9 aa, Artificial Sequence
  hAFP158 A2
FANKFIYEI

SEQ ID NO: 68 - protein, 9 aa, Artificial Sequence
  hAFP158 A3
FMAKFIYEI

SEQ ID NO: 69 - protein, 9 aa, Artificial Sequence
  hAFP158 A4
FMNAFIYEI

SEQ ID NO: 70 - protein, 9 aa, Artificial Sequence
  hAFP158 A5
FMNKAIYEI

SEQ ID NO: 71 - protein, 9 aa, Artificial Sequence
  hAFP158 A6
FMNKFAYEI

SEQ ID NO: 72 - protein, 9 aa, Artificial Sequence
  hAFP158 A7
FMNKFIAEI

SEQ ID NO: 73 - protein, 9 aa, Artificial Sequence
  hAFP158 A8
FMNKFIYAI

SEQ ID NO: 74 - protein, 9 aa, Artificial Sequence
  hAFP158 A9
FMNKFIYEA

SEQ ID NO: 75 - protein, 251 aa, Artificial Sequence
  AS170036
QLVLTQPSSVSGTPGQTVTISCAGTSSDVGSENYVSWYRQLPGTAPKLLIYQVNKRASGIADRFSGSKSGNTASMTISGLQSADEADYYCASYRSSDHNIVFGGGTHLTVLGGGGSGGGGSGGGGSAVQLVESGGGLVQPGGSLRLSCTASGFTFSSYAMSWVRQAPGKGLEWVSTINSGTGSPYYADSVKGRFTISRDNAKNTLYLQLNSLKTEDTAMYYCAKNFFDGSWFLGPPAMDYWGKGTLVTISS

SEQ ID NO: 76 - protein, 125 aa, Artificial Sequence
  AS170036 VH
AVQLVESGGGLVQPGGSLRLSCTASGFTFSSYAMSWVRQAPGKGLEWVSTINSGTGSPYYADSVKGRFTISRDNAKNTLYLQLNSLKTEDTAMYYCAKNFFDGSWFLGPPAMDYWGKGTLVTISS

SEQ ID NO: 77 - DNA, 375 bp, Artificial Sequence
  AS170036 VH nucleotide sequence
gcggtgcagctggtggagtctgggggaggcttggtgcagcctggggggtctctgagactctcctgcacagcctctggattcaccttcagtagctatgccatgagttgggtccgccaggctccagggaagggactcgagtgggtctcaactattaatagtggtactggtagcccatactatgcagactccgtgaagggccgattcaccatctccagagacaacgccaagaacacgctctatctgcaattgaacagcctgaaaactgaggacacggccatgtattactgtgcaaaaaatttcttcgacggtagttggtttcttggccctcccgccatggactactggggcaaaggaaccctggtcaccatctcctca

SEQ ID NO: 78 - protein, 10 aa, Artificial Sequence
  AS170036 HCDR1
GFTFSSYAMS

SEQ ID NO: 79 - DNA, 30 bp, Artificial Sequence
  AS170036 HCDR1 nucleotide sequence
ggattcaccttcagtagctatgccatgagt

SEQ ID NO: 80 - protein, 17 aa, Artificial Sequence
  AS170036 HCDR2
TINSGTGSPYYADSVKG

SEQ ID NO: 81 - DNA, 51 bp, Artificial Sequence
  AS170036 HCDR2 nucleotide sequence
actattaatagtggtactggtagcccatactatgcagactccgtgaagggc

SEQ ID NO: 82 - protein, 16 aa, Artificial Sequence
  AS170036 HCDR3
NFFDGSWFLGPPAMDY

SEQ ID NO: 83 - DNA, 48 bp, Artificial Sequence
  AS170036 HCDR3 nucleotide sequence
aatttcttcgacggtagttggtttcttggccctcccgccatggactac

SEQ ID NO: 84 - protein, 111 aa, Artificial Sequence
  AS170036 VL
QLVLTQPSSVSGTPGQTVTISCAGTSSDVGSENYVSWYRQLPGTAPKLLIYQVNKRASGIADRFSGSKSGNTASMTISGLQSADEADYYCASYRSSDHNIVFGGGTHLTVL

SEQ ID NO: 85 - DNA, 333 bp, Artificial Sequence
  AS170036 VL nucleotide sequence
cagcttgtgctgactcagccttcctcggtgtccgggactccaggacagacggtcaccatctcctgtgctggaaccagcagtgatgttgggtctgaaaactatgtctcctggtaccgacagctcccaggaacggcccccaaactcctgatttatcaggtcaataaacgagcctcggggattgctgatcgcttctctggctccaagtcaggtaacacggcctccatgaccatctctgggctccaatctgcggacgaggctgactattactgtgcctcatatagaagtagcgaccataatattgtgttcggcggagggacccatctgaccgtcctg

SEQ ID NO: 86 - protein, 14 aa, Artificial Sequence
  AS170036 LCDR1
AGTSSDVGSENYVS

SEQ ID NO: 87 - DNA, 42 bp, Artificial Sequence
  AS170036 LCDR1 nucleotide sequence
gctggaaccagcagtgatgttgggtctgaaaactatgtctcc

SEQ ID NO: 88 - protein, 7 aa, Artificial Sequence
  AS170036 LCDR2
QVNKRAS

SEQ ID NO: 89 - DNA, 21 bp, Artificial Sequence
  AS170036 LCDR2 nucleotide sequence
caggtcaataaacgagcctcg

SEQ ID NO: 90 - protein, 11 aa, Artificial Sequence
  AS170036 LCDR3
ASYRSSDHNIV

SEQ ID NO: 91 - DNA, 33 bp, Artificial Sequence
  AS170036 LCDR3 nucleotide sequence
gcctcatatagaagtagcgaccataatattgtg

SEQ ID NO: 92 - protein, 245 aa, Artificial Sequence
  AS179723
QAGLTQPPSMSGSPRQSVTISCTGSSNNIGGNYVNWYQHLPGTAPKLLIYDNKNRPSGVPEQISGSKSGSSASLTITGLQAEDEGDYYCASWDDSLSAVVFGGGTHLTVLGGGGSGGGGSGGGGSEVQLVESGGGLVQPGGSLRLSCAASGFTFLNYAMSWVRQAPGKGLEWVSSNSGAGSTYYSDSVKGRFTISRDYAKNVVYLQLNSLKTEDTGMYYCAKGTNVGSWSSLHYWGQGTQVTVSS

SEQ ID NO: 93 - protein, 120 aa, Artificial Sequence
  AS179723 VH
EVQLVESGGGLVQPGGSLRLSCAASGFTFLNYAMSWVRQAPGKGLEWVSSNSGAGSTYYSDSVKGRFTISRDYAKNVVYLQLNSLKTEDTGMYYCAKGTNVGSWSSLHYWGQGTQVTVSS

SEQ ID NO: 94 - DNA, 360 bp, Artificial Sequence
  AS179723 VH nucleotide sequence
gaggtacagctggtggagtctgggggaggcttggtgcagcctggggggtctctgagactctcctgtgcagcctctggattcaccttccttaattatgccatgagctgggtccgccaggctccaggaaagggactcgagtgggtctcatctaatagtggtgctggtagcacatactattcagactccgtgaagggccgattcaccatctccagagactacgccaagaacgttgtgtatctgcaattgaacagcctgaaaactgaggacacgggcatgtattactgtgcaaaagggacgaacgttggtagctggtcttccttacattactggggccaggggacccaggtcaccgtctcctca

SEQ ID NO: 95 - protein, 10 aa, Artificial Sequence
  AS179723 HCDR1
GFTFLNYAMS

SEQ ID NO: 96 - DNA, 30 bp, Artificial Sequence
  AS179723 HCDR1 nucleotide sequence
ggattcaccttccttaattatgccatgagc

SEQ ID NO: 97 - protein, 16 aa, Artificial Sequence
  AS179723 HCDR2
SNSGAGSTYYSDSVKG

SEQ ID NO: 98 - DNA, 48 bp, Artificial Sequence
  AS179723 HCDR2 nucleotide sequence
tctaatagtggtgctggtagcacatactattcagactccgtgaagggc

SEQ ID NO: 99 - protein, 12 aa, Artificial Sequence
  AS179723 HCDR3
GTNVGSWSSLHY

SEQ ID NO: 100 - DNA, 36 bp, Artificial Sequence
  AS179723 HCDR3 nucleotide sequence
gggacgaacgttggtagctggtcttccttacattac

SEQ ID NO: 101 - protein, 110 aa, Artificial Sequence
  AS179723 VL
QAGLTQPPSMSGSPRQSVTISCTGSSNNIGGNYVNWYQHLPGTAPKLLIYDNKNRPSGVPEQISGSKSGSSASLTITGLQAEDEGDYYCASWDDSLSAVVFGGGTHLTVL

SEQ ID NO: 102 - DNA, 330 bp, Artificial Sequence
  AS179723 VL nucleotide sequence
caggcagggctgactcagccgccctccatgtctggatccccgaggcagagtgtcaccatctcctgcactggaagcagcaacaacatcgggggtaattatgtaaactggtaccaacatctcccaggaacggcccccaaacttctgatctatgataacaagaacaggccctcgggggtccccgagcagatctctggctccaagtctggcagctctgcctccctgaccatcactgggctccaggctgaggacgagggtgactattactgcgcatcctgggatgacagcctcagtgctgttgtgttcggcggagggacccatctgaccgtcctg

SEQ ID NO: 103 - protein, 13 aa, Artificial Sequence
  AS179723 LCDR1
TGSSNNIGGNYVN

SEQ ID NO: 104 - DNA, 39 bp, Artificial Sequence
  AS179723 LCDR1 nucleotide sequence
actggaagcagcaacaacatcgggggtaattatgtaaac

SEQ ID NO: 105 - protein, 7 aa, Artificial Sequence
  AS179723 LCDR2
DNKNRPS

SEQ ID NO: 106 - DNA, 21 bp, Artificial Sequence
  AS179723 LCDR2 nucleotide sequence
gataacaagaacaggccctcg

SEQ ID NO: 107 - protein, 11 aa, Artificial Sequence
  AS179723 LCDR3
ASWDDSLSAVV

SEQ ID NO: 108 - DNA, 33 bp, Artificial Sequence
  AS179723 LCDR3 nucleotide sequence
gcatcctgggatgacagcctcagtgctgttgtg

SEQ ID NO: 109 - protein, 245 aa, Artificial Sequence
  AS179732
NFMLTQPPSMSGSPRQSVTISCTGSSSNIGGNYVNWYQHLPGTAPKLLIYDNSNRASGVPERFSGSKSGSSASLTITGLQAEDEGDYYCASWDDSLSGAVFGGGTHLTVLGGGGSGGGGSGGGGSEVQLVESGGGLVQPGGSLRLSCAASGFTFLNYAMSWVRQAPGKGLEWVSSNSGAGSTYYSDSVKGRFTISRDYAKNVVYLQLNSLKTEDTGMYYCAKGTNVGSWSSLHYWGQGTQVTVSS

SEQ ID NO: 110 - protein, 110 aa, Artificial Sequence
  AS179732 VL
NFMLTQPPSMSGSPRQSVTISCTGSSSNIGGNYVNWYQHLPGTAPKLLIYDNSNRASGVPERFSGSKSGSSASLTITGLQAEDEGDYYCASWDDSLSGAVFGGGTHLTVL

SEQ ID NO: 111 - DNA, 330 bp, Artificial Sequence
  AS179732 VL nucleotide sequence
aattttatgctgactcagccgccctccatgtctggatccccgaggcagagtgtcaccatctcctgcactggaagcagcagcaacatcgggggtaattatgtaaactggtaccaacatctcccaggaacggcccccaaactcctgatctatgataacagcaacagggcctcgggggtccccgagcgcttctctggctccaagtctggcagctctgcctccctgaccatcactgggctccaggctgaggacgagggtgactattactgcgcatcctgggatgacagcctcagtggtgctgtgttcggcggagggacccatctgaccgtcctg

SEQ ID NO: 112 - protein, 13 aa, Artificial Sequence
  AS179732 LCDR1
TGSSSNIGGNYVN

SEQ ID NO: 113 - DNA, 39 bp, Artificial Sequence
  AS179732 LCDR1 nucleotide sequence
actggaagcagcagcaacatcgggggtaattatgtaaac

SEQ ID NO: 114 - protein, 7 aa, Artificial Sequence
  AS179732 LCDR2
DNSNRAS

SEQ ID NO: 115 - DNA, 21 bp, Artificial Sequence
  AS179732 LCDR2 nucleotide sequence
gataacagcaacagggcctcg

SEQ ID NO: 116 - protein, 11 aa, Artificial Sequence
  AS179732 LCDR3
ASWDDSLSGAV

SEQ ID NO: 117 - DNA, 33 bp, Artificial Sequence
  AS179732 LCDR3 nucleotide sequence
gcatcctgggatgacagcctcagtggtgctgtg

SEQ ID NO: 118 - protein, 246 aa, Artificial Sequence
  AS190259
QSVVTQPSAVSVSLEETATITCQGGGYYVNWYQQKPGQAPVLVIYLNTNRPSGIPERFSASKSGGTATLTINGAQAEDEAAYYCQSADSSGNSAVFGGGTHLTVLGGGGSGGGGSGGGGSQVQLVQSGGGLVQPGGSLRLSCAASGFTFSSYAMSWVRQAPGKGLEWVSAINSGGGSTYYADSVKGRFTISRDNAKNTLYLQLNSLKTEDTAMYYCAKAASGYGGSWWGDATLDAWGQGTLVTVSS

SEQ ID NO: 119 - protein, 126 aa, Artificial Sequence
  AS190259 VH
QVQLVQSGGGLVQPGGSLRLSCAASGFTFSSYAMSWVRQAPGKGLEWVSAINSGGGSTYYADSVKGRFTISRDNAKNTLYLQLNSLKTEDTAMYYCAKAASGYGGSWWGDATLDAWGQGTLVTVSS

SEQ ID NO: 120 - DNA, 378 bp, Artificial Sequence
  AS190259 VH nucleotide sequence
caggtgcagctggtgcagtctgggggaggcttggtgcagcctggggggtctctgagactctcctgtgcagcctctggattcaccttcagtagctatgccatgagctgggtccgccaggctccagggaagggactcgagtgggtctcagctattaatagtggtggtggtagcacatactatgcagactccgtgaagggccgattcaccatctccagagacaacgccaagaacacgctgtatctgcaattgaacagcctgaaaactgaggacacggccatgtattactgtgcaaaagcggcgagcgggtacggtggtagctggtggggggacgcgactttggacgcatggggccaggggacactggtcactgtctcctca

SEQ ID NO: 121 - protein, 10 aa, Artificial Sequence
  AS190259 HCDR1
GFTFSSYAMS

SEQ ID NO: 122 - DNA, 30 bp, Artificial Sequence
  AS190259 HCDR1 nucleotide sequence
ggattcaccttcagtagctatgccatgagc

SEQ ID NO: 123 - protein, 17 aa, Artificial Sequence
  AS190259 HCDR2
AINSGGGSTYYADSVKG

SEQ ID NO: 124 - DNA, 51 bp, Artificial Sequence
  AS190259 HCDR2 nucleotide sequence
gctattaatagtggtggtggtagcacatactatgcagactccgtgaagggc

SEQ ID NO: 125 - protein, 17 aa, Artificial Sequence
  AS190259 HCDR3
AASGYGGSWWGDATLDA

SEQ ID NO: 126 - DNA, 51 bp, Artificial Sequence
  AS190259 HCDR3 nucleotide sequence
gcggcgagcgggtacggtggtagctggtggggggacgcgactttggacgca

SEQ ID NO: 127 - protein, 105 aa, Artificial Sequence
  AS190259 VL
QSVVTQPSAVSVSLEETATITCQGGGYYVNWYQQKPGQAPVLVIYLNTNRPSGIPERFSASKSGGTATLTINGAQAEDEAAYYCQSADSSGNSAVFGGGTHLTVL

SEQ ID NO: 128 - DNA, 315 bp, Artificial Sequence
  AS190259 VL nucleotide sequence
cagtctgtcgtgacgcagccctccgcagtgtccgtgtccttggaagagacggccacgatcacctgccaaggaggcggttattatgttaattggtaccagcagaagccagggcaggcccctgtgttggtcatttatctaaatactaataggccctcggggatccctgagcgattctctgcttccaagtcggggggcacagccaccctgaccatcaacggggcccaggccgaggatgaggccgcctattactgtcagtcagcagacagcagtggtaacagtgctgtgtttggcggagggacccatctgaccgtcctg

SEQ ID NO: 129 - protein, 8 aa, Artificial Sequence
  AS190259 LCDR1
QGGGYYVN

SEQ ID NO: 130 - DNA, 24 bp, Artificial Sequence
  AS190259 LCDR1 nucleotide sequence
caaggaggcggttattatgttaat

SEQ ID NO: 131 - protein, 7 aa, Artificial Sequence
  AS190259 LCDR2
LNTNRPS

SEQ ID NO: 132 - DNA, 21 bp, Artificial Sequence
  AS190259 LCDR2 nucleotide sequence
ctaaatactaataggccctcg

SEQ ID NO: 133 - protein, 11 aa, Artificial Sequence
  AS190259 LCDR3
QSADSSGNSAV

SEQ ID NO: 134 - DNA, 33 bp, Artificial Sequence
  AS190259 LCDR3 nucleotide sequence
cagtcagcagacagcagtggtaacagtgctgtg

SEQ ID NO: 135 - protein, 242 aa, Artificial Sequence
  AS148691
DIQMTQSPSSLSASVGDRVTITCRASQSVSSAVAWYQQKPGKAPKLLIYSASSLYSGVPSRFSGSRSGTDFTLTISSLQPEDFATYYCQQYYGAYLITFGQGTKVEIKGGGGSGGGGSGGGGSEVQLVESGGGLVQPGGSLRLSCAASGFNLYYSSIHWVRQAPGKGLEWVASIYSSYGSTSYADSVKGRFTISADTSKNTAYLQMNSLRAEDTAVYYCARVGPGYYGIDYWGQGTLVTVSS

SEQ ID NO: 136 - protein, 119 aa, Artificial Sequence
  AS148691 VH
EVQLVESGGGLVQPGGSLRLSCAASGFNLYYSSIHWVRQAPGKGLEWVASIYSSYGSTSYADSVKGRFTISADTSKNTAYLQMNSLRAEDTAVYYCARVGPGYYGIDYWGQGTLVTVSS

SEQ ID NO: 137 - DNA, 357 bp, Artificial Sequence
  AS148691 VH nucleotide sequence
gaggttcaactggtggagagcggtggtggtctggttcagccgggtggtagcctgcgtctgagctgcgcagcttctggcttcaacctctattattcttctatccactgggtgcgtcaggcgccgggtaaaggcctggaatgggttgcatctatttattcttcttatggctctacttcttatgccgatagcgtcaagggccgtttcaccatcagcgcggataccagcaaaaacaccgcatacctgcaaatgaacagcctgcgtgcggaagataccgccgtctattattgtgctcgcgttggtccgggttactacggtattgactactggggtcaaggcaccctggttaccgtgagcagc

SEQ ID NO: 138 - protein, 10 aa, Artificial Sequence
  AS148691 HCDR1
GFNLYYSSIH

SEQ ID NO: 139 - DNA, 30 bp, Artificial Sequence
  AS148691 HCDR1 nucleotide sequence
ggcttcaacctctattattcttctatccac

SEQ ID NO: 140 - protein, 16 aa, Artificial Sequence
  AS148691 HCDR2
IYSSYGSTSYADSVKG

SEQ ID NO: 141 - DNA, 48 bp, Artificial Sequence
  AS148691 HCDR2 nucleotide sequence
atttattcttcttatggctctacttcttatgccgatagcgtcaagggc

SEQ ID NO: 142 - protein, 10 aa, Artificial Sequence
  AS148691 HCDR3
VGPGYYGIDY

SEQ ID NO: 143 - DNA, 30 bp, Artificial Sequence
  AS148691 HCDR3 nucleotide sequence
gttggtccgggttactacggtattgactac

SEQ ID NO: 144 - protein, 108 aa, Artificial Sequence
  AS148691 VL
DIQMTQSPSSLSASVGDRVTITCRASQSVSSAVAWYQQKPGKAPKLLIYSASSLYSGVPSRFSGSRSGTDFTLTISSLQPEDFATYYCQQYYGAYLITFGQGTKVEIK

SEQ ID NO: 145 - DNA, 324 bp, Artificial Sequence
  AS148691 VL nucleotide sequence
gacatccagatgacccagagcccgagcagcctgagcgcgagcgttggtgaccgtgttaccattacctgccgtgcgagccagagcgttagcagcgcggtggcgtggtaccagcaaaagccgggtaaagcgccgaagctgctgatctatagcgcgagcagcctgtatagcggcgttccgagccgtttcagcggtagccgtagcggcaccgactttaccctgaccattagcagcctgcagccggaagatttcgcaacttattactgtcagcaatactacggtgcttacctgatcacgttcggacagggcaccaaagttgagattaaa

SEQ ID NO: 146 - protein, 11 aa, Artificial Sequence
  AS148691 LCDR1
RASQSVSSAVA

SEQ ID NO: 147 - DNA, 33 bp, Artificial Sequence
  AS148691 LCDR1 nucleotide sequence
cgtgcgagccagagcgttagcagcgcggtggcg

SEQ ID NO: 148 - protein, 7 aa, Artificial Sequence
  AS148691 LCDR2
SASSLYS

SEQ ID NO: 149 - DNA, 21 bp, Artificial Sequence
  AS148691 LCDR2 nucleotide sequence
agcgcgagcagcctgtatagc

SEQ ID NO: 150 - protein, 10 aa, Artificial Sequence
  AS148691 LCDR3
QQYYGAYLIT

SEQ ID NO: 151 - DNA, 30 bp, Artificial Sequence
  AS148691 LCDR3 nucleotide sequence
cagcaatactacggtgcttacctgatcacg

SEQ ID NO: 152 - protein, 124 aa, Artificial Sequence
  AS167821
QVRLVESGGGSVQAGGSLRLSCAASGRTYSTYCMGWFRQAPGKEREGVATIYIGSGRTYYVDSVKGRFTISQDNAKNTLYLQMNNLKPEDTAMYYCTADVDPYESSWSRGLGYWGQGTQVTVSS

SEQ ID NO: 153 - DNA, 372 bp, Artificial Sequence
  AS167821 nucleotide sequence
caggtgaggttggtggagtctgggggaggctcggtgcaggctggagggtctctgagactctcctgtgcagcctctggacgcacctacagtacttactgcatgggctggttccgccaggctccagggaaggagcgcgagggggtcgccactatttatattggtagtggtaggacatattatgtcgactccgtgaagggccgattcaccatctcccaagacaacgccaagaacacgctgtatctgcaaatgaacaatctgaaacctgaggacactgccatgtactactgtacggcagatgtagacccgtacgaaagtagctggtcaaggggccttggttactggggccaggggacccaggtcaccgtctcctca

SEQ ID NO: 154 - protein, 5 aa, Artificial Sequence
  AS167821 HCDR1
TYCMG

SEQ ID NO: 155 - DNA, 15 bp, Artificial Sequence
  AS167821 HCDR1 nucleotide sequence
acttactgcatgggc

SEQ ID NO: 156 - protein, 14 aa, Artificial Sequence
  AS167821 HCDR2
IGSGRTYYVDSVKG

SEQ ID NO: 157 - DNA, 42 bp, Artificial Sequence
  AS167821 HCDR2 nucleotide sequence
attggtagtggtaggacatattatgtcgactccgtgaagggc

SEQ ID NO: 158 - protein, 15 aa, Artificial Sequence
  AS167821 HCDR3
DVDPYESSWSRGLGY

SEQ ID NO: 159 - DNA, 45 bp, Artificial Sequence
  AS167821 HCDR3 nucleotide sequence
gatgtagacccgtacgaaagtagctggtcaaggggccttggttac

SEQ ID NO: 160 - protein, 127 aa, Artificial Sequence
  AS167830
QVKLVESGGGSVQAGGSLRLSCAASRSSEYMNRRFCMGWFRQASGKEREGVAVVYIGGGRTYYADSVKGRFTISQDNAKNTLYLQMNNLKPEDTAMYYCTADVDPYESSWSRDLGYWGQGTQVTVSS

SEQ ID NO: 161 - DNA, 381 bp, Artificial Sequence
  AS167830 nucleotide sequence
caggtgaagttggtggagtctgggggaggctcggtgcaggctggagggtctctgagactctcctgtgcagcctctcgcagctctgaatacatgaatagacgattctgcatgggctggttccgccaggcttcagggaaggagcgcgagggggtcgcagtggtttatattggtggtggtaggacatattatgccgactccgtgaagggccgattcaccatctcccaagacaacgccaagaacacgctgtatctgcaaatgaacaatctgaaacctgaggacactgccatgtactactgtacggcagatgtagacccgtacgaaagtagctggtcaagggaccttggttactggggccaggggacccaggtcaccgtctcctca

SEQ ID NO: 162 - protein, 8 aa, Artificial Sequence
  AS167830 HCDR1
MNRRFCMG

SEQ ID NO: 163 - DNA, 24 bp, Artificial Sequence
  AS167830 HCDR1 nucleotide sequence
atgaatagacgattctgcatgggc

SEQ ID NO: 164 - protein, 14 aa, Artificial Sequence
  AS167830 HCDR2
IGGGRTYYADSVKG

SEQ ID NO: 165 - DNA, 42 bp, Artificial Sequence
  AS167830 HCDR2 nucleotide sequence
attggtggtggtaggacatattatgccgactccgtgaagggc

SEQ ID NO: 166 - protein, 15 aa, Artificial Sequence
  AS167830 HCDR3
DVDPYESSWSRDLGY

SEQ ID NO: 167 - DNA, 45 bp, Artificial Sequence
  AS167830 HCDR3 nucleotide sequence
gatgtagacccgtacgaaagtagctggtcaagggaccttggttac

SEQ ID NO: 168 - protein, 125 aa, Artificial Sequence
  AS170036 VH1
EVQLVESGGGLVQPGGSLRLSCAASGFTFSSYAMSWVRQAPGKGLEWVSTINSGTGSPYYADSVKGRFTISRDNSKNTLYLQMNSLRAEDTAVYYCAKNFFDGSWFLGPPAMDYWGQGTLVTVSS

SEQ ID NO: 169 - protein, 125 aa, Artificial Sequence
  AS170036 VH2
EVQLVESGGGLVQPGGSLRLSCTASGFTFSSYAMSWVRQAPGKGLEWVSTINSGTGSPYYADSVKGRFTISRDNSKNTLYLQMNSLRAEDTAMYYCAKNFFDGSWFLGPPAMDYWGQGTLVTVSS

SEQ ID NO: 170 - protein, 111 aa, Artificial Sequence
  AS170036 VL1
QSALTQPRSVSGSPGQSVTISCAGTSSDVGSENYVSWYQQHPGKAPKLMIYQVNKRASGVPDRFSGSKSGNTASLTISGLQAEDEADYYCASYRSSDHNIVFGGGTKLTVL

SEQ ID NO: 171 - protein, 111 aa, Artificial Sequence
  AS170036 VL2
QSALTQPRSVSGSPGQSVTISCAGTSSDVGSENYVSWYQQHPGKAPKLLIYQVNKRASGIPDRFSGSKSGNTASLTISGLQAEDEADYYCASYRSSDHNIVFGGGTKLTVL

SEQ ID NO: 172 - protein, 120 aa, Artificial Sequence
  AS179723/AS179732 VH1
EVQLVESGGGLVQPGGSLRLSCAASGFTFLNYAMSWVRQAPGKGLEWVSSNSGAGSTYYSDSVKGRFTISRDNSKNTLYLQMNSLRAEDTAVYYCAKGTNVGSWSSLHYWGQGTLVTVSS

SEQ ID NO: 173 - protein, 120 aa, Artificial Sequence
  AS179723/AS179732 VH1g1
EVQLVESGGGLVQPGGSLRLSCAASGFTFLNYAMSWVRQAPGKGLEWVSSNSGAGSTYYADSVKGRFTISRDNSKNTLYLQMNSLRAEDTAVYYCAKGTNVGSWSSLHYWGQGTLVTVSS

SEQ ID NO: 174 - protein, 120 aa, Artificial Sequence
  AS179723/AS179732 VH1g1-N73Y
EVQLVESGGGLVQPGGSLRLSCAASGFTFLNYAMSWVRQAPGKGLEWVSSNSGAGSTYYADSVKGRFTISRDYSKNTLYLQMNSLRAEDTAVYYCAKGTNVGSWSSLHYWGQGTLVTVSS

SEQ ID NO: 175 - protein, 110 aa, Artificial Sequence
  AS179723 VL1
QSVLTQPPSASGTPGQRVTISCTGSSNNIGGNYVNWYQQLPGTAPKLLIYDNKNRPSGVPDRFSGSKSGTSASLAISGLQSEDEADYYCASWDDSLSAVVFGGGTKLTVL

SEQ ID NO: 176 - protein, 110 aa, Artificial Sequence
  AS179723 VL1g1
QSVLTQPPSASGTPGQRVTISCSGSSNNIGGNYVNWYQQLPGTAPKLLIYDNKNRPSGVPDRFSGSKSGTSASLAISGLQSEDEADYYCASWDDSLSAVVFGGGTKLTVL

SEQ ID NO: 177 - protein, 110 aa, Artificial Sequence
  AS179732 VL1
QSVLTQPPSASGTPGQRVTISCTGSSSNIGGNYVNWYQQLPGTAPKLLIYDNSNRASGVPDRFSGSKSGTSASLAISGLQSEDEADYYCASWDDSLSGAVFGGGTKLTVL

SEQ ID NO: 178 - protein, 110 aa, Artificial Sequence
  AS179732 VL1g1
QSVLTQPPSASGTPGQRVTISCSGSSSNIGGNYVNWYQQLPGTAPKLLIYDNSNRASGVPDRFSGSKSGTSASLAISGLQSEDEADYYCASWDDSLSGAVFGGGTKLTVL

SEQ ID NO: 179 - protein, 126 aa, Artificial Sequence
  AS190259 VH1
EVQLVESGGGLVQPGGSLRLSCAASGFTFSSYAMSWVRQAPGKGLEWVSAINSGGGSTYYADSVKGRFTISRDNSKNTLYLQMNSLRAEDTAVYYCAKAASGYGGSWWGDATLDAWGQGTLVTVSS

SEQ ID NO: 180 - protein, 126 aa, Artificial Sequence
  AS190259 VH1g1
EVQLVESGGGLVQPGGSLRLSCAASGFTFSSYAMSWVRQAPGKGLEWVSAISGSGGSTYYADSVKGRFTISRDNSKNTLYLQMNSLRAEDTAVYYCAKAASGYGGSWWGDATLDAWGQGTLVTVSS

SEQ ID NO: 181 - protein, 105 aa, Artificial Sequence
  AS190259 VL1
SSELTQDPAVSVALGQTVRITCQGGGYYVNWYQQKPGQAPVLVIYLNTNRPSGIPDRFSGSSSGNTASLTITGAQAEDEADYYCQSADSSGNSAVFGGGTKLTVL

SEQ ID NO: 182 - protein, 105 aa, Artificial Sequence
  AS190259 VL2
SSELTQDPAVSVALGQTVTITCQGGGYYVNWYQQKPGQAPVLVIYLNTNRPSGIPDRFSGSSSGNTASLTITGAQAEDEAAYYCQSADSSGNSAVFGGGTKLTVL

SEQ ID NO: 183 - protein, 251 aa, Artificial Sequence
  AS170036 VL1VH1
QSALTQPRSVSGSPGQSVTISCAGTSSDVGSENYVSWYQQHPGKAPKLMIYQVNKRASGVPDRFSGSKSGNTASLTISGLQAEDEADYYCASYRSSDHNIVFGGGTKLTVLGGGGSGGGGSGGGGSEVQLVESGGGLVQPGGSLRLSCAASGFTFSSYAMSWVRQAPGKGLEWVSTINSGTGSPYYADSVKGRFTISRDNSKNTLYLQMNSLRAEDTAVYYCAKNFFDGSWFLGPPAMDYWGQGTLVTVSS

SEQ ID NO: 184 - DNA, 753 bp, Artificial Sequence
  AS170036 VL1VH1 nucleotide sequence
cagagcgccctgacccagcctaggtctgtgagcggctccccaggccagtctgtgaccatcagctgcgcaggaacaagctccgacgtgggatctgagaactacgtgagctggtatcagcagcacccaggcaaggcccccaagctgatgatctaccaggtgaacaagagggccagcggcgtgccagatcgcttctctggcagcaagtccggcaataccgcctccctgacaatctctggactgcaggcagaggacgaggcagattactattgcgcctcctatcgctctagcgaccacaatatcgtgtttggcggcggcaccaagctgacagtgctgggaggaggaggatccggaggaggaggctctggcggcggcggcagcgaggtgcagctggtggagagcggcggcggcctggtgcagcccggcggcagcctgcggctgtcctgtgccgcctctggcttcaccttttcctcttacgcaatgtcctgggtgagacaggcaccaggcaagggactggagtgggtgagcaccatcaactccggcacaggctctccttactatgccgactctgtgaagggccggttcaccatcagcagagataactccaagaatacactgtacctgcagatgaactccctgcgggccgaggatacagccgtgtactattgtgccaagaatttctttgacggctcttggtttctgggcccccctgccatggattattggggccagggcaccctggtgacagtgagctcc

SEQ ID NO: 185 - protein, 245 aa, Artificial Sequence
  AS179723 VL1g1VH1g1-N73Y
QSVLTQPPSASGTPGQRVTISCSGSSNNIGGNYVNWYQQLPGTAPKLLIYDNKNRPSGVPDRFSGSKSGTSASLAISGLQSEDEADYYCASWDDSLSAVVFGGGTKLTVLGGGGSGGGGSGGGGSEVQLVESGGGLVQPGGSLRLSCAASGFTFLNYAMSWVRQAPGKGLEWVSSNSGAGSTYYADSVKGRFTISRDYSKNTLYLQMNSLRAEDTAVYYCAKGTNVGSWSSLHYWGQGTLVTVSS

SEQ ID NO: 186 - DNA, 735 bp, Artificial Sequence
  AS179723 VL1g1VH1g1-N73Y nucleotide sequence
caatccgtgctgacacagccccccagcgcctctggcaccccaggccagagagtgaccatcagctgtagcggaagcagcaacaacatcggcggcaactacgtgaactggtaccagcagctgcctggaaccgctcctaagctgctgatctacgacaacaagaacagacctagcggcgtgcctgatcggttcagcggctccaagtccggcacatccgcttctctggccatctctggcctgcaatccgaggacgaggccgactactattgcgcctcttgggacgacagcctgtctgctgtggtgttcggcggcggcaccaagctgaccgtgctgggcggtggaggctctggcggcggcggctctggcggcggaggcagcgaggtgcagctggtggaaagcggcggcggactggtgcagcctggcggatctctgagactgagctgcgccgcttctggatttaccttcctgaactacgccatgagctgggtgcggcaggcccctggcaaaggcctggaatgggtcagctccaacagcggcgctggctccacctactacgccgattctgtgaagggcagattcacaatctcccgggactacagcaaaaatacactgtacctgcagatgaactccctcagagccgaggataccgccgtgtactactgcgccaagggcaccaacgtgggctcttggtccagcctgcactactggggtcagggcaccctggtcaccgtgtccagt

SEQ ID NO: 187 - protein, 245 aa, Artificial Sequence
  AS179732 VL1g1VH1g1-N73Y
QSVLTQPPSASGTPGQRVTISCSGSSSNIGGNYVNWYQQLPGTAPKLLIYDNSNRASGVPDRFSGSKSGTSASLAISGLQSEDEADYYCASWDDSLSGAVFGGGTKLTVLGGGGSGGGGSGGGGSEVQLVESGGGLVQPGGSLRLSCAASGFTFLNYAMSWVRQAPGKGLEWVSSNSGAGSTYYADSVKGRFTISRDYSKNTLYLQMNSLRAEDTAVYYCAKGTNVGSWSSLHYWGQGTLVTVSS

SEQ ID NO: 188 - DNA, 736 bp, Artificial Sequence
  AS179732 VL1g1VH1g1-N73Y nucleotide sequence
caatccgtgctgacacagcctccatctgcctctggcacccccggacagagagtgaccatctcctgcagcggcagctcctctaacatcggcggcaactacgtgaactggtaccagcagctgcctggaacagctcccaagctgctgatctacgacaacagcaaccgggctagtggcgtgcctgatagattttctggctccaagtccggcacctccgcttctctggccatctccggcctgcagagcgaggacgaggccgactactactgtgccagctgggacgactctctgtctggcgccgtgttcggcggaggcaccaagctgaccgtgctgggcggcggaggatctggaggcggcggttctggcggaggcggctccgaggtgcagctggtggaaagcggcggcggcctcgtccaacctggcggctctctgcggctgtcctgcgccgcttctggcttcaccttcctcaactacgccatgagctgggtgcggcaggcccctggcaaaggcctggaatgggtcagcagcaatagcggcgctggcagcacctactatgccgatagcgtgaagggtagattcaccatctctagagattatagcaagaacaccctgtacctgcagatgaacagcctgagagccgaggacaccgccgtgtactactgcgccaagggcaccaacgtgggctcctggtccagcctgcactactggggccagggcacactggtgacagtgtcctccg

SEQ ID NO: 189 - protein, 246 aa, Artificial Sequence
  AS190259 VL1VH1
SSELTQDPAVSVALGQTVRITCQGGGYYVNWYQQKPGQAPVLVIYLNTNRPSGIPDRFSGSSSGNTASLTITGAQAEDEADYYCQSADSSGNSAVFGGGTKLTVLGGGGSGGGGSGGGGSEVQLVESGGGLVQPGGSLRLSCAASGFTFSSYAMSWVRQAPGKGLEWVSAINSGGGSTYYADSVKGRFTISRDNSKNTLYLQMNSLRAEDTAVYYCAKAASGYGGSWWGDATLDAWGQGTLVTVSS

SEQ ID NO: 190 - DNA, 738 bp, Artificial Sequence
  AS190259 VL1VH1 nucleotide sequence
agctccgaactgacccaggaccccgccgtgtccgtggccctgggacagaccgtgcggatcacctgtcagggcggcggctactacgtgaactggtaccagcagaagcctggccaggctcctgtgctggtgatctacctgaacaccaacagacctagcggcatccccgacagattctctggctcttctagcggcaataccgccagcctcaccattaccggcgcccaggccgaagatgaggccgactactactgccagagcgccgacagcagcggaaattctgctgtgttcggcggcggcaccaagctgacagttctgggcggaggtggcagcggcggcggcggcagcggcggcggcggcagcgaggtgcagctggtcgagagcggcggcggactggtgcaacctggcggcagcctgagactgagctgcgctgcctccggctttacattcagcagctacgccatgagctgggtccggcaggctccaggaaaaggcctggaatgggtgtctgccatcaacagcggcggaggctctacatactacgccgacagcgtgaagggcagattcaccatcagcagagataactctaagaacacactgtacctgcaaatgaacagcctgcgggccgaggacaccgccgtgtactattgcgccaaggccgcctccggatatggcggaagctggtggggagatgcaacactggacgcctggggccagggcacactggtgaccgtgtccagc

SEQ ID NO: 191 - protein, 251 aa, Artificial Sequence
  AS170036 VL1VH1-VLH98V
QSALTQPRSVSGSPGQSVTISCAGTSSDVGSENYVSWYQQHPGKAPKLMIYQVNKRASGVPDRFSGSKSGNTASLTISGLQAEDEADYYCASYRSSDVNIVFGGGTKLTVLGGGGSGGGGSGGGGSEVQLVESGGGLVQPGGSLRLSCAASGFTFSSYAMSWVRQAPGKGLEWVSTINSGTGSPYYADSVKGRFTISRDNSKNTLYLQMNSLRAEDTAVYYCAKNFFDGSWFLGPPAMDYWGQGTLVTVSS

SEQ ID NO: 192 - protein, 251 aa, Artificial Sequence
  AS170036 VL1VH1-VLH98T
QSALTQPRSVSGSPGQSVTISCAGTSSDVGSENYVSWYQQHPGKAPKLMIYQVNKRASGVPDRFSGSKSGNTASLTISGLQAEDEADYYCASYRSSDTNIVFGGGTKLTVLGGGGSGGGGSGGGGSEVQLVESGGGLVQPGGSLRLSCAASGFTFSSYAMSWVRQAPGKGLEWVSTINSGTGSPYYADSVKGRFTISRDNSKNTLYLQMNSLRAEDTAVYYCAKNFFDGSWFLGPPAMDYWGQGTLVTVSS

SEQ ID NO: 193 - protein, 251 aa, Artificial Sequence
  AS170036 VL1VH1-VLH98Q
QSALTQPRSVSGSPGQSVTISCAGTSSDVGSENYVSWYQQHPGKAPKLMIYQVNKRASGVPDRFSGSKSGNTASLTISGLQAEDEADYYCASYRSSDQNIVFGGGTKLTVLGGGGSGGGGSGGGGSEVQLVESGGGLVQPGGSLRLSCAASGFTFSSYAMSWVRQAPGKGLEWVSTINSGTGSPYYADSVKGRFTISRDNSKNTLYLQMNSLRAEDTAVYYCAKNFFDGSWFLGPPAMDYWGQGTLVTVSS

SEQ ID NO: 194 - protein, 251 aa, Artificial Sequence
  AS170036 VL1VH1-VLH98P
QSALTQPRSVSGSPGQSVTISCAGTSSDVGSENYVSWYQQHPGKAPKLMIYQVNKRASGVPDRFSGSKSGNTASLTISGLQAEDEADYYCASYRSSDPNIVFGGGTKLTVLGGGGSGGGGSGGGGSEVQLVESGGGLVQPGGSLRLSCAASGFTFSSYAMSWVRQAPGKGLEWVSTINSGTGSPYYADSVKGRFTISRDNSKNTLYLQMNSLRAEDTAVYYCAKNFFDGSWFLGPPAMDYWGQGTLVTVSS

SEQ ID NO: 195 - protein, 251 aa, Artificial Sequence
  AS170036 VL1VH1-VLH98I
QSALTQPRSVSGSPGQSVTISCAGTSSDVGSENYVSWYQQHPGKAPKLMIYQVNKRASGVPDRFSGSKSGNTASLTISGLQAEDEADYYCASYRSSDINIVFGGGTKLTVLGGGGSGGGGSGGGGSEVQLVESGGGLVQPGGSLRLSCAASGFTFSSYAMSWVRQAPGKGLEWVSTINSGTGSPYYADSVKGRFTISRDNSKNTLYLQMNSLRAEDTAVYYCAKNFFDGSWFLGPPAMDYWGQGTLVTVSS

SEQ ID NO: 196 - protein, 251 aa, Artificial Sequence
  AS170036 VL1VH1-VLH98F
QSALTQPRSVSGSPGQSVTISCAGTSSDVGSENYVSWYQQHPGKAPKLMIYQVNKRASGVPDRFSGSKSGNTASLTISGLQAEDEADYYCASYRSSDFNIVFGGGTKLTVLGGGGSGGGGSGGGGSEVQLVESGGGLVQPGGSLRLSCAASGFTFSSYAMSWVRQAPGKGLEWVSTINSGTGSPYYADSVKGRFTISRDNSKNTLYLQMNSLRAEDTAVYYCAKNFFDGSWFLGPPAMDYWGQGTLVTVSS

SEQ ID NO: 197 - protein, 251 aa, Artificial Sequence
  AS170036 VL1VH1-VLH98A
QSALTQPRSVSGSPGQSVTISCAGTSSDVGSENYVSWYQQHPGKAPKLMIYQVNKRASGVPDRFSGSKSGNTASLTISGLQAEDEADYYCASYRSSDANIVFGGGTKLTVLGGGGSGGGGSGGGGSEVQLVESGGGLVQPGGSLRLSCAASGFTFSSYAMSWVRQAPGKGLEWVSTINSGTGSPYYADSVKGRFTISRDNSKNTLYLQMNSLRAEDTAVYYCAKNFFDGSWFLGPPAMDYWGQGTLVTVSS

SEQ ID NO: 198 - protein, 251 aa, Artificial Sequence
  AS170036 VL1VH1-VLE32W
QSALTQPRSVSGSPGQSVTISCAGTSSDVGSWNYVSWYQQHPGKAPKLMIYQVNKRASGVPDRFSGSKSGNTASLTISGLQAEDEADYYCASYRSSDHNIVFGGGTKLTVLGGGGSGGGGSGGGGSEVQLVESGGGLVQPGGSLRLSCAASGFTFSSYAMSWVRQAPGKGLEWVSTINSGTGSPYYADSVKGRFTISRDNSKNTLYLQMNSLRAEDTAVYYCAKNFFDGSWFLGPPAMDYWGQGTLVTVSS

SEQ ID NO: 199 - protein, 251 aa, Artificial Sequence
  AS170036 VL1VH1-VHG56Y
QSALTQPRSVSGSPGQSVTISCAGTSSDVGSENYVSWYQQHPGKAPKLMIYQVNKRASGVPDRFSGSKSGNTASLTISGLQAEDEADYYCASYRSSDHNIVFGGGTKLTVLGGGGSGGGGSGGGGSEVQLVESGGGLVQPGGSLRLSCAASGFTFSSYAMSWVRQAPGKGLEWVSTINSGTYSPYYADSVKGRFTISRDNSKNTLYLQMNSLRAEDTAVYYCAKNFFDGSWFLGPPAMDYWGQGTLVTVSS

SEQ ID NO: 200 - protein, 251 aa, Artificial Sequence
  AS170036 VL1VH1-VHG56N
QSALTQPRSVSGSPGQSVTISCAGTSSDVGSENYVSWYQQHPGKAPKLMIYQVNKRASGVPDRFSGSKSGNTASLTISGLQAEDEADYYCASYRSSDHNIVFGGGTKLTVLGGGGSGGGGSGGGGSEVQLVESGGGLVQPGGSLRLSCAASGFTFSSYAMSWVRQAPGKGLEWVSTINSGTNSPYYADSVKGRFTISRDNSKNTLYLQMNSLRAEDTAVYYCAKNFFDGSWFLGPPAMDYWGQGTLVTVSS

SEQ ID NO: 201 - protein, 251 aa, Artificial Sequence
  AS170036 VL1VH1-VHG56F
QSALTQPRSVSGSPGQSVTISCAGTSSDVGSENYVSWYQQHPGKAPKLMIYQVNKRASGVPDRFSGSKSGNTASLTISGLQAEDEADYYCASYRSSDHNIVFGGGTKLTVLGGGGSGGGGSGGGGSEVQLVESGGGLVQPGGSLRLSCAASGFTFSSYAMSWVRQAPGKGLEWVSTINSGTFSPYYADSVKGRFTISRDNSKNTLYLQMNSLRAEDTAVYYCAKNFFDGSWFLGPPAMDYWGQGTLVTVSS

SEQ ID NO: 202 - protein, 251 aa, Artificial Sequence
  AS170036 VL1VH1-VHS57R
QSALTQPRSVSGSPGQSVTISCAGTSSDVGSENYVSWYQQHPGKAPKLMIYQVNKRASGVPDRFSGSKSGNTASLTISGLQAEDEADYYCASYRSSDHNIVFGGGTKLTVLGGGGSGGGGSGGGGSEVQLVESGGGLVQPGGSLRLSCAASGFTFSSYAMSWVRQAPGKGLEWVSTINSGTGRPYYADSVKGRFTISRDNSKNTLYLQMNSLRAEDTAVYYCAKNFFDGSWFLGPPAMDYWGQGTLVTVSS

SEQ ID NO: 203 - protein, 251 aa, Artificial Sequence
  AS170036 VL1VH1-VHS57Q
QSALTQPRSVSGSPGQSVTISCAGTSSDVGSENYVSWYQQHPGKAPKLMIYQVNKRASGVPDRFSGSKSGNTASLTISGLQAEDEADYYCASYRSSDHNIVFGGGTKLTVLGGGGSGGGGSGGGGSEVQLVESGGGLVQPGGSLRLSCAASGFTFSSYAMSWVRQAPGKGLEWVSTINSGTGQPYYADSVKGRFTISRDNSKNTLYLQMNSLRAEDTAVYYCAKNFFDGSWFLGPPAMDYWGQGTLVTVSS

SEQ ID NO: 204 - protein, 251 aa, Artificial Sequence
  AS170036 VL1VH1-VHS57M
QSALTQPRSVSGSPGQSVTISCAGTSSDVGSENYVSWYQQHPGKAPKLMIYQVNKRASGVPDRFSGSKSGNTASLTISGLQAEDEADYYCASYRSSDHNIVFGGGTKLTVLGGGGSGGGGSGGGGSEVQLVESGGGLVQPGGSLRLSCAASGFTFSSYAMSWVRQAPGKGLEWVSTINSGTGMPYYADSVKGRFTISRDNSKNTLYLQMNSLRAEDTAVYYCAKNFFDGSWFLGPPAMDYWGQGTLVTVSS

SEQ ID NO: 205 - protein, 251 aa, Artificial Sequence
  AS170036 VL1VH1-VHS57K
QSALTQPRSVSGSPGQSVTISCAGTSSDVGSENYVSWYQQHPGKAPKLMIYQVNKRASGVPDRFSGSKSGNTASLTISGLQAEDEADYYCASYRSSDHNIVFGGGTKLTVLGGGGSGGGGSGGGGSEVQLVESGGGLVQPGGSLRLSCAASGFTFSSYAMSWVRQAPGKGLEWVSTINSGTGKPYYADSVKGRFTISRDNSKNTLYLQMNSLRAEDTAVYYCAKNFFDGSWFLGPPAMDYWGQGTLVTVSS

SEQ ID NO: 206 - protein, 251 aa, Artificial Sequence
  AS170036 VL1VH1-VHS57H
QSALTQPRSVSGSPGQSVTISCAGTSSDVGSENYVSWYQQHPGKAPKLMIYQVNKRASGVPDRFSGSKSGNTASLTISGLQAEDEADYYCASYRSSDHNIVFGGGTKLTVLGGGGSGGGGSGGGGSEVQLVESGGGLVQPGGSLRLSCAASGFTFSSYAMSWVRQAPGKGLEWVSTINSGTGHPYYADSVKGRFTISRDNSKNTLYLQMNSLRAEDTAVYYCAKNFFDGSWFLGPPAMDYWGQGTLVTVSS

SEQ ID NO: 207 - protein, 251 aa, Artificial Sequence
  AS170036 VL1VH1-VHG108S
QSALTQPRSVSGSPGQSVTISCAGTSSDVGSENYVSWYQQHPGKAPKLMIYQVNKRASGVPDRFSGSKSGNTASLTISGLQAEDEADYYCASYRSSDHNIVFGGGTKLTVLGGGGSGGGGSGGGGSEVQLVESGGGLVQPGGSLRLSCAASGFTFSSYAMSWVRQAPGKGLEWVSTINSGTGSPYYADSVKGRFTISRDNSKNTLYLQMNSLRAEDTAVYYCAKNFFDGSWFLSPPAMDYWGQGTLVTVSS

SEQ ID NO: 208 - protein, 251 aa, Artificial Sequence
  AS170036 VL1VH1-VHG108N
QSALTQPRSVSGSPGQSVTISCAGTSSDVGSENYVSWYQQHPGKAPKLMIYQVNKRASGVPDRFSGSKSGNTASLTISGLQAEDEADYYCASYRSSDHNIVFGGGTKLTVLGGGGSGGGGSGGGGSEVQLVESGGGLVQPGGSLRLSCAASGFTFSSYAMSWVRQAPGKGLEWVSTINSGTGSPYYADSVKGRFTISRDNSKNTLYLQMNSLRAEDTAVYYCAKNFFDGSWFLNPPAMDYWGQGTLVTVSS

SEQ ID NO: 209 - protein, 251 aa, Artificial Sequence
  AS170036 VL1VH1-VHG108M
QSALTQPRSVSGSPGQSVTISCAGTSSDVGSENYVSWYQQHPGKAPKLMIYQVNKRASGVPDRFSGSKSGNTASLTISGLQAEDEADYYCASYRSSDHNIVFGGGTKLTVLGGGGSGGGGSGGGGSEVQLVESGGGLVQPGGSLRLSCAASGFTFSSYAMSWVRQAPGKGLEWVSTINSGTGSPYYADSVKGRFTISRDNSKNTLYLQMNSLRAEDTAVYYCAKNFFDGSWFLMPPAMDYWGQGTLVTVSS

SEQ ID NO: 210 - protein, 251 aa, Artificial Sequence
  AS170036 VL1VH1-VHG108E
QSALTQPRSVSGSPGQSVTISCAGTSSDVGSENYVSWYQQHPGKAPKLMIYQVNKRASGVPDRFSGSKSGNTASLTISGLQAEDEADYYCASYRSSDHNIVFGGGTKLTVLGGGGSGGGGSGGGGSEVQLVESGGGLVQPGGSLRLSCAASGFTFSSYAMSWVRQAPGKGLEWVSTINSGTGSPYYADSVKGRFTISRDNSKNTLYLQMNSLRAEDTAVYYCAKNFFDGSWFLEPPAMDYWGQGTLVTVSS

SEQ ID NO: 211 - protein, 251 aa, Artificial Sequence
  AS170036 VL1VH1-VHG108D
QSALTQPRSVSGSPGQSVTISCAGTSSDVGSENYVSWYQQHPGKAPKLMIYQVNKRASGVPDRFSGSKSGNTASLTISGLQAEDEADYYCASYRSSDHNIVFGGGTKLTVLGGGGSGGGGSGGGGSEVQLVESGGGLVQPGGSLRLSCAASGFTFSSYAMSWVRQAPGKGLEWVSTINSGTGSPYYADSVKGRFTISRDNSKNTLYLQMNSLRAEDTAVYYCAKNFFDGSWFLDPPAMDYWGQGTLVTVSS

SEQ ID NO: 212 - protein, 251 aa, Artificial Sequence
  AS170036 VL1VH1-VHG108A
QSALTQPRSVSGSPGQSVTISCAGTSSDVGSENYVSWYQQHPGKAPKLMIYQVNKRASGVPDRFSGSKSGNTASLTISGLQAEDEADYYCASYRSSDHNIVFGGGTKLTVLGGGGSGGGGSGGGGSEVQLVESGGGLVQPGGSLRLSCAASGFTFSSYAMSWVRQAPGKGLEWVSTINSGTGSPYYADSVKGRFTISRDNSKNTLYLQMNSLRAEDTAVYYCAKNFFDGSWFLAPPAMDYWGQGTLVTVSS

SEQ ID NO: 213 - protein, 251 aa, Artificial Sequence
  01-AS170036 VL1VH1-56Y98F
QSALTQPRSVSGSPGQSVTISCAGTSSDVGSENYVSWYQQHPGKAPKLMIYQVNKRASGVPDRFSGSKSGNTASLTISGLQAEDEADYYCASYRSSDFNIVFGGGTKLTVLGGGGSGGGGSGGGGSEVQLVESGGGLVQPGGSLRLSCAASGFTFSSYAMSWVRQAPGKGLEWVSTINSGTYSPYYADSVKGRFTISRDNSKNTLYLQMNSLRAEDTAVYYCAKNFFDGSWFLGPPAMDYWGQGTLVTVSS

SEQ ID NO: 214 - protein, 251 aa, Artificial Sequence
  02-AS170036 VL1VH1-56Y98I
QSALTQPRSVSGSPGQSVTISCAGTSSDVGSENYVSWYQQHPGKAPKLMIYQVNKRASGVPDRFSGSKSGNTASLTISGLQAEDEADYYCASYRSSDINIVFGGGTKLTVLGGGGSGGGGSGGGGSEVQLVESGGGLVQPGGSLRLSCAASGFTFSSYAMSWVRQAPGKGLEWVSTINSGTYSPYYADSVKGRFTISRDNSKNTLYLQMNSLRAEDTAVYYCAKNFFDGSWFLGPPAMDYWGQGTLVTVSS

SEQ ID NO: 215 - protein, 251 aa, Artificial Sequence
  03-AS170036 VL1VH1-56Y98Q
QSALTQPRSVSGSPGQSVTISCAGTSSDVGSENYVSWYQQHPGKAPKLMIYQVNKRASGVPDRFSGSKSGNTASLTISGLQAEDEADYYCASYRSSDQNIVFGGGTKLTVLGGGGSGGGGSGGGGSEVQLVESGGGLVQPGGSLRLSCAASGFTFSSYAMSWVRQAPGKGLEWVSTINSGTYSPYYADSVKGRFTISRDNSKNTLYLQMNSLRAEDTAVYYCAKNFFDGSWFLGPPAMDYWGQGTLVTVSS

SEQ ID NO: 216 - protein, 251 aa, Artificial Sequence
  04-AS170036 VL1VH1-56N98F
QSALTQPRSVSGSPGQSVTISCAGTSSDVGSENYVSWYQQHPGKAPKLMIYQVNKRASGVPDRFSGSKSGNTASLTISGLQAEDEADYYCASYRSSDFNIVFGGGTKLTVLGGGGSGGGGSGGGGSEVQLVESGGGLVQPGGSLRLSCAASGFTFSSYAMSWVRQAPGKGLEWVSTINSGTNSPYYADSVKGRFTISRDNSKNTLYLQMNSLRAEDTAVYYCAKNFFDGSWFLGPPAMDYWGQGTLVTVSS

SEQ ID NO: 217 - protein, 251 aa, Artificial Sequence
  05-AS170036 VL1VH1-56N98I
QSALTQPRSVSGSPGQSVTISCAGTSSDVGSENYVSWYQQHPGKAPKLMIYQVNKRASGVPDRFSGSKSGNTASLTISGLQAEDEADYYCASYRSSDINIVFGGGTKLTVLGGGGSGGGGSGGGGSEVQLVESGGGLVQPGGSLRLSCAASGFTFSSYAMSWVRQAPGKGLEWVSTINSGTNSPYYADSVKGRFTISRDNSKNTLYLQMNSLRAEDTAVYYCAKNFFDGSWFLGPPAMDYWGQGTLVTVSS

SEQ ID NO: 218 - protein, 251 aa, Artificial Sequence
  06-AS170036 VL1VH1-56N98Q
QSALTQPRSVSGSPGQSVTISCAGTSSDVGSENYVSWYQQHPGKAPKLMIYQVNKRASGVPDRFSGSKSGNTASLTISGLQAEDEADYYCASYRSSDQNIVFGGGTKLTVLGGGGSGGGGSGGGGSEVQLVESGGGLVQPGGSLRLSCAASGFTFSSYAMSWVRQAPGKGLEWVSTINSGTNSPYYADSVKGRFTISRDNSKNTLYLQMNSLRAEDTAVYYCAKNFFDGSWFLGPPAMDYWGQGTLVTVSS

SEQ ID NO: 219 - protein, 251 aa, Artificial Sequence
  07-AS170036 VL1VH1-57H98F
QSALTQPRSVSGSPGQSVTISCAGTSSDVGSENYVSWYQQHPGKAPKLMIYQVNKRASGVPDRFSGSKSGNTASLTISGLQAEDEADYYCASYRSSDFNIVFGGGTKLTVLGGGGSGGGGSGGGGSEVQLVESGGGLVQPGGSLRLSCAASGFTFSSYAMSWVRQAPGKGLEWVSTINSGTGHPYYADSVKGRFTISRDNSKNTLYLQMNSLRAEDTAVYYCAKNFFDGSWFLGPPAMDYWGQGTLVTVSS

SEQ ID NO: 220 - protein, 251 aa, Artificial Sequence
  08-AS170036 VL1VH1-57H98I
QSALTQPRSVSGSPGQSVTISCAGTSSDVGSENYVSWYQQHPGKAPKLMIYQVNKRASGVPDRFSGSKSGNTASLTISGLQAEDEADYYCASYRSSDINIVFGGGTKLTVLGGGGSGGGGSGGGGSEVQLVESGGGLVQPGGSLRLSCAASGFTFSSYAMSWVRQAPGKGLEWVSTINSGTGHPYYADSVKGRFTISRDNSKNTLYLQMNSLRAEDTAVYYCAKNFFDGSWFLGPPAMDYWGQGTLVTVSS

SEQ ID NO: 221 - protein, 251 aa, Artificial Sequence
  09-AS170036 VL1VH1-57H98Q
QSALTQPRSVSGSPGQSVTISCAGTSSDVGSENYVSWYQQHPGKAPKLMIYQVNKRASGVPDRFSGSKSGNTASLTISGLQAEDEADYYCASYRSSDQNIVFGGGTKLTVLGGGGSGGGGSGGGGSEVQLVESGGGLVQPGGSLRLSCAASGFTFSSYAMSWVRQAPGKGLEWVSTINSGTGHPYYADSVKGRFTISRDNSKNTLYLQMNSLRAEDTAVYYCAKNFFDGSWFLGPPAMDYWGQGTLVTVSS

SEQ ID NO: 222 - protein, 251 aa, Artificial Sequence
  10-AS170036 VL1VH1-57K98F
QSALTQPRSVSGSPGQSVTISCAGTSSDVGSENYVSWYQQHPGKAPKLMIYQVNKRASGVPDRFSGSKSGNTASLTISGLQAEDEADYYCASYRSSDFNIVFGGGTKLTVLGGGGSGGGGSGGGGSEVQLVESGGGLVQPGGSLRLSCAASGFTFSSYAMSWVRQAPGKGLEWVSTINSGTGKPYYADSVKGRFTISRDNSKNTLYLQMNSLRAEDTAVYYCAKNFFDGSWFLGPPAMDYWGQGTLVTVSS

SEQ ID NO: 223 - protein, 251 aa, Artificial Sequence
  11-AS170036 VL1VH1-57K98I
QSALTQPRSVSGSPGQSVTISCAGTSSDVGSENYVSWYQQHPGKAPKLMIYQVNKRASGVPDRFSGSKSGNTASLTISGLQAEDEADYYCASYRSSDINIVFGGGTKLTVLGGGGSGGGGSGGGGSEVQLVESGGGLVQPGGSLRLSCAASGFTFSSYAMSWVRQAPGKGLEWVSTINSGTGKPYYADSVKGRFTISRDNSKNTLYLQMNSLRAEDTAVYYCAKNFFDGSWFLGPPAMDYWGQGTLVTVSS

SEQ ID NO: 224 - protein, 251 aa, Artificial Sequence
  12-AS170036 VL1VH1-57K98Q
QSALTQPRSVSGSPGQSVTISCAGTSSDVGSENYVSWYQQHPGKAPKLMIYQVNKRASGVPDRFSGSKSGNTASLTISGLQAEDEADYYCASYRSSDQNIVFGGGTKLTVLGGGGSGGGGSGGGGSEVQLVESGGGLVQPGGSLRLSCAASGFTFSSYAMSWVRQAPGKGLEWVSTINSGTGKPYYADSVKGRFTISRDNSKNTLYLQMNSLRAEDTAVYYCAKNFFDGSWFLGPPAMDYWGQGTLVTVSS

SEQ ID NO: 225 - protein, 251 aa, Artificial Sequence
  13-AS170036 VL1VH1-57M98F
QSALTQPRSVSGSPGQSVTISCAGTSSDVGSENYVSWYQQHPGKAPKLMIYQVNKRASGVPDRFSGSKSGNTASLTISGLQAEDEADYYCASYRSSDFNIVFGGGTKLTVLGGGGSGGGGSGGGGSEVQLVESGGGLVQPGGSLRLSCAASGFTFSSYAMSWVRQAPGKGLEWVSTINSGTGMPYYADSVKGRFTISRDNSKNTLYLQMNSLRAEDTAVYYCAKNFFDGSWFLGPPAMDYWGQGTLVTVSS

SEQ ID NO: 226 - protein, 251 aa, Artificial Sequence
  14-AS170036 VL1VH1-57M98I
QSALTQPRSVSGSPGQSVTISCAGTSSDVGSENYVSWYQQHPGKAPKLMIYQVNKRASGVPDRFSGSKSGNTASLTISGLQAEDEADYYCASYRSSDINIVFGGGTKLTVLGGGGSGGGGSGGGGSEVQLVESGGGLVQPGGSLRLSCAASGFTFSSYAMSWVRQAPGKGLEWVSTINSGTGMPYYADSVKGRFTISRDNSKNTLYLQMNSLRAEDTAVYYCAKNFFDGSWFLGPPAMDYWGQGTLVTVSS

SEQ ID NO: 227 - protein, 251 aa, Artificial Sequence
  15-AS170036 VL1VH1-57M98Q
QSALTQPRSVSGSPGQSVTISCAGTSSDVGSENYVSWYQQHPGKAPKLMIYQVNKRASGVPDRFSGSKSGNTASLTISGLQAEDEADYYCASYRSSDQNIVFGGGTKLTVLGGGGSGGGGSGGGGSEVQLVESGGGLVQPGGSLRLSCAASGFTFSSYAMSWVRQAPGKGLEWVSTINSGTGMPYYADSVKGRFTISRDNSKNTLYLQMNSLRAEDTAVYYCAKNFFDGSWFLGPPAMDYWGQGTLVTVSS

SEQ ID NO: 228 - protein, 251 aa, Artificial Sequence
  16-AS170036 VL1VH1-56Y108A
QSALTQPRSVSGSPGQSVTISCAGTSSDVGSENYVSWYQQHPGKAPKLMIYQVNKRASGVPDRFSGSKSGNTASLTISGLQAEDEADYYCASYRSSDHNIVFGGGTKLTVLGGGGSGGGGSGGGGSEVQLVESGGGLVQPGGSLRLSCAASGFTFSSYAMSWVRQAPGKGLEWVSTINSGTYSPYYADSVKGRFTISRDNSKNTLYLQMNSLRAEDTAVYYCAKNFFDGSWFLAPPAMDYWGQGTLVTVSS

SEQ ID NO: 229 - protein, 251 aa, Artificial Sequence
  17-AS170036 VL1VH1-56Y108D
QSALTQPRSVSGSPGQSVTISCAGTSSDVGSENYVSWYQQHPGKAPKLMIYQVNKRASGVPDRFSGSKSGNTASLTISGLQAEDEADYYCASYRSSDHNIVFGGGTKLTVLGGGGSGGGGSGGGGSEVQLVESGGGLVQPGGSLRLSCAASGFTFSSYAMSWVRQAPGKGLEWVSTINSGTYSPYYADSVKGRFTISRDNSKNTLYLQMNSLRAEDTAVYYCAKNFFDGSWFLDPPAMDYWGQGTLVTVSS

SEQ ID NO: 230 - protein, 251 aa, Artificial Sequence
  18-AS170036 VL1VH1-56Y108S
QSALTQPRSVSGSPGQSVTISCAGTSSDVGSENYVSWYQQHPGKAPKLMIYQVNKRASGVPDRFSGSKSGNTASLTISGLQAEDEADYYCASYRSSDHNIVFGGGTKLTVLGGGGSGGGGSGGGGSEVQLVESGGGLVQPGGSLRLSCAASGFTFSSYAMSWVRQAPGKGLEWVSTINSGTYSPYYADSVKGRFTISRDNSKNTLYLQMNSLRAEDTAVYYCAKNFFDGSWFLSPPAMDYWGQGTLVTVSS

SEQ ID NO: 231 - protein, 251 aa, Artificial Sequence
  19-AS170036 VL1VH1-56N108A
QSALTQPRSVSGSPGQSVTISCAGTSSDVGSENYVSWYQQHPGKAPKLMIYQVNKRASGVPDRFSGSKSGNTASLTISGLQAEDEADYYCASYRSSDHNIVFGGGTKLTVLGGGGSGGGGSGGGGSEVQLVESGGGLVQPGGSLRLSCAASGFTFSSYAMSWVRQAPGKGLEWVSTINSGTNSPYYADSVKGRFTISRDNSKNTLYLQMNSLRAEDTAVYYCAKNFFDGSWFLAPPAMDYWGQGTLVTVSS

SEQ ID NO: 232 - protein, 251 aa, Artificial Sequence
  20-AS170036 VL1VH1-56N108D
QSALTQPRSVSGSPGQSVTISCAGTSSDVGSENYVSWYQQHPGKAPKLMIYQVNKRASGVPDRFSGSKSGNTASLTISGLQAEDEADYYCASYRSSDHNIVFGGGTKLTVLGGGGSGGGGSGGGGSEVQLVESGGGLVQPGGSLRLSCAASGFTFSSYAMSWVRQAPGKGLEWVSTINSGTNSPYYADSVKGRFTISRDNSKNTLYLQMNSLRAEDTAVYYCAKNFFDGSWFLDPPAMDYWGQGTLVTVSS

SEQ ID NO: 233 - protein, 251 aa, Artificial Sequence
  21-AS170036 VL1VH1-56N108S
QSALTQPRSVSGSPGQSVTISCAGTSSDVGSENYVSWYQQHPGKAPKLMIYQVNKRASGVPDRFSGSKSGNTASLTISGLQAEDEADYYCASYRSSDHNIVFGGGTKLTVLGGGGSGGGGSGGGGSEVQLVESGGGLVQPGGSLRLSCAASGFTFSSYAMSWVRQAPGKGLEWVSTINSGTNSPYYADSVKGRFTISRDNSKNTLYLQMNSLRAEDTAVYYCAKNFFDGSWFLSPPAMDYWGQGTLVTVSS

SEQ ID NO: 234 - protein, 251 aa, Artificial Sequence
  22-AS170036 VL1VH1-57H108A
QSALTQPRSVSGSPGQSVTISCAGTSSDVGSENYVSWYQQHPGKAPKLMIYQVNKRASGVPDRFSGSKSGNTASLTISGLQAEDEADYYCASYRSSDHNIVFGGGTKLTVLGGGGSGGGGSGGGGSEVQLVESGGGLVQPGGSLRLSCAASGFTFSSYAMSWVRQAPGKGLEWVSTINSGTGHPYYADSVKGRFTISRDNSKNTLYLQMNSLRAEDTAVYYCAKNFFDGSWFLAPPAMDYWGQGTLVTVSS

SEQ ID NO: 235 - protein, 251 aa, Artificial Sequence
  23-AS170036 VL1VH1-57H108D
QSALTQPRSVSGSPGQSVTISCAGTSSDVGSENYVSWYQQHPGKAPKLMIYQVNKRASGVPDRFSGSKSGNTASLTISGLQAEDEADYYCASYRSSDHNIVFGGGTKLTVLGGGGSGGGGSGGGGSEVQLVESGGGLVQPGGSLRLSCAASGFTFSSYAMSWVRQAPGKGLEWVSTINSGTGHPYYADSVKGRFTISRDNSKNTLYLQMNSLRAEDTAVYYCAKNFFDGSWFLDPPAMDYWGQGTLVTVSS

SEQ ID NO: 236 - protein, 251 aa, Artificial Sequence
  24-AS170036 VL1VH1-57H108S
QSALTQPRSVSGSPGQSVTISCAGTSSDVGSENYVSWYQQHPGKAPKLMIYQVNKRASGVPDRFSGSKSGNTASLTISGLQAEDEADYYCASYRSSDHNIVFGGGTKLTVLGGGGSGGGGSGGGGSEVQLVESGGGLVQPGGSLRLSCAASGFTFSSYAMSWVRQAPGKGLEWVSTINSGTGHPYYADSVKGRFTISRDNSKNTLYLQMNSLRAEDTAVYYCAKNFFDGSWFLSPPAMDYWGQGTLVTVSS

SEQ ID NO: 237 - protein, 251 aa, Artificial Sequence
  25-AS170036 VL1VH1-57K108A
QSALTQPRSVSGSPGQSVTISCAGTSSDVGSENYVSWYQQHPGKAPKLMIYQVNKRASGVPDRFSGSKSGNTASLTISGLQAEDEADYYCASYRSSDHNIVFGGGTKLTVLGGGGSGGGGSGGGGSEVQLVESGGGLVQPGGSLRLSCAASGFTFSSYAMSWVRQAPGKGLEWVSTINSGTGKPYYADSVKGRFTISRDNSKNTLYLQMNSLRAEDTAVYYCAKNFFDGSWFLAPPAMDYWGQGTLVTVSS

SEQ ID NO: 238 - protein, 251 aa, Artificial Sequence
  26-AS170036 VL1VH1-57K108D
QSALTQPRSVSGSPGQSVTISCAGTSSDVGSENYVSWYQQHPGKAPKLMIYQVNKRASGVPDRFSGSKSGNTASLTISGLQAEDEADYYCASYRSSDHNIVFGGGTKLTVLGGGGSGGGGSGGGGSEVQLVESGGGLVQPGGSLRLSCAASGFTFSSYAMSWVRQAPGKGLEWVSTINSGTGKPYYADSVKGRFTISRDNSKNTLYLQMNSLRAEDTAVYYCAKNFFDGSWFLDPPAMDYWGQGTLVTVSS

SEQ ID NO: 239 - protein, 251 aa, Artificial Sequence
  27-AS170036 VL1VH1-57K108S
QSALTQPRSVSGSPGQSVTISCAGTSSDVGSENYVSWYQQHPGKAPKLMIYQVNKRASGVPDRFSGSKSGNTASLTISGLQAEDEADYYCASYRSSDHNIVFGGGTKLTVLGGGGSGGGGSGGGGSEVQLVESGGGLVQPGGSLRLSCAASGFTFSSYAMSWVRQAPGKGLEWVSTINSGTGKPYYADSVKGRFTISRDNSKNTLYLQMNSLRAEDTAVYYCAKNFFDGSWFLSPPAMDYWGQGTLVTVSS

SEQ ID NO: 240 - protein, 251 aa, Artificial Sequence
  28-AS170036 VL1VH1-57M108A
QSALTQPRSVSGSPGQSVTISCAGTSSDVGSENYVSWYQQHPGKAPKLMIYQVNKRASGVPDRFSGSKSGNTASLTISGLQAEDEADYYCASYRSSDHNIVFGGGTKLTVLGGGGSGGGGSGGGGSEVQLVESGGGLVQPGGSLRLSCAASGFTFSSYAMSWVRQAPGKGLEWVSTINSGTGMPYYADSVKGRFTISRDNSKNTLYLQMNSLRAEDTAVYYCAKNFFDGSWFLAPPAMDYWGQGTLVTVSS

SEQ ID NO: 241 - protein, 251 aa, Artificial Sequence
  29-AS170036 VL1VH1-57M108D
QSALTQPRSVSGSPGQSVTISCAGTSSDVGSENYVSWYQQHPGKAPKLMIYQVNKRASGVPDRFSGSKSGNTASLTISGLQAEDEADYYCASYRSSDHNIVFGGGTKLTVLGGGGSGGGGSGGGGSEVQLVESGGGLVQPGGSLRLSCAASGFTFSSYAMSWVRQAPGKGLEWVSTINSGTGMPYYADSVKGRFTISRDNSKNTLYLQMNSLRAEDTAVYYCAKNFFDGSWFLDPPAMDYWGQGTLVTVSS

SEQ ID NO: 242 - protein, 251 aa, Artificial Sequence
  30-AS170036 VL1VH1-57M108S
QSALTQPRSVSGSPGQSVTISCAGTSSDVGSENYVSWYQQHPGKAPKLMIYQVNKRASGVPDRFSGSKSGNTASLTISGLQAEDEADYYCASYRSSDHNIVFGGGTKLTVLGGGGSGGGGSGGGGSEVQLVESGGGLVQPGGSLRLSCAASGFTFSSYAMSWVRQAPGKGLEWVSTINSGTGMPYYADSVKGRFTISRDNSKNTLYLQMNSLRAEDTAVYYCAKNFFDGSWFLSPPAMDYWGQGTLVTVSS

SEQ ID NO: 243 - protein, 251 aa, Artificial Sequence
  31-AS170036 VL1VH1-98F108A
QSALTQPRSVSGSPGQSVTISCAGTSSDVGSENYVSWYQQHPGKAPKLMIYQVNKRASGVPDRFSGSKSGNTASLTISGLQAEDEADYYCASYRSSDFNIVFGGGTKLTVLGGGGSGGGGSGGGGSEVQLVESGGGLVQPGGSLRLSCAASGFTFSSYAMSWVRQAPGKGLEWVSTINSGTGSPYYADSVKGRFTISRDNSKNTLYLQMNSLRAEDTAVYYCAKNFFDGSWFLAPPAMDYWGQGTLVTVSS

SEQ ID NO: 244 - protein, 251 aa, Artificial Sequence
  32-AS170036 VL1VH1-98F108D
QSALTQPRSVSGSPGQSVTISCAGTSSDVGSENYVSWYQQHPGKAPKLMIYQVNKRASGVPDRFSGSKSGNTASLTISGLQAEDEADYYCASYRSSDFNIVFGGGTKLTVLGGGGSGGGGSGGGGSEVQLVESGGGLVQPGGSLRLSCAASGFTFSSYAMSWVRQAPGKGLEWVSTINSGTGSPYYADSVKGRFTISRDNSKNTLYLQMNSLRAEDTAVYYCAKNFFDGSWFLDPPAMDYWGQGTLVTVSS

SEQ ID NO: 245 - protein, 251 aa, Artificial Sequence
  33-AS170036 VL1VH1-98F108S
QSALTQPRSVSGSPGQSVTISCAGTSSDVGSENYVSWYQQHPGKAPKLMIYQVNKRASGVPDRFSGSKSGNTASLTISGLQAEDEADYYCASYRSSDFNIVFGGGTKLTVLGGGGSGGGGSGGGGSEVQLVESGGGLVQPGGSLRLSCAASGFTFSSYAMSWVRQAPGKGLEWVSTINSGTGSPYYADSVKGRFTISRDNSKNTLYLQMNSLRAEDTAVYYCAKNFFDGSWFLSPPAMDYWGQGTLVTVSS

SEQ ID NO: 246 - protein, 251 aa, Artificial Sequence
  34-AS170036 VL1VH1-98I108A
QSALTQPRSVSGSPGQSVTISCAGTSSDVGSENYVSWYQQHPGKAPKLMIYQVNKRASGVPDRFSGSKSGNTASLTISGLQAEDEADYYCASYRSSDINIVFGGGTKLTVLGGGGSGGGGSGGGGSEVQLVESGGGLVQPGGSLRLSCAASGFTFSSYAMSWVRQAPGKGLEWVSTINSGTGSPYYADSVKGRFTISRDNSKNTLYLQMNSLRAEDTAVYYCAKNFFDGSWFLAPPAMDYWGQGTLVTVSS

SEQ ID NO: 247 - protein, 251 aa, Artificial Sequence
  35-AS170036 VL1VH1-98I108D
QSALTQPRSVSGSPGQSVTISCAGTSSDVGSENYVSWYQQHPGKAPKLMIYQVNKRASGVPDRFSGSKSGNTASLTISGLQAEDEADYYCASYRSSDINIVFGGGTKLTVLGGGGSGGGGSGGGGSEVQLVESGGGLVQPGGSLRLSCAASGFTFSSYAMSWVRQAPGKGLEWVSTINSGTGSPYYADSVKGRFTISRDNSKNTLYLQMNSLRAEDTAVYYCAKNFFDGSWFLDPPAMDYWGQGTLVTVSS

SEQ ID NO: 248 - protein, 251 aa, Artificial Sequence
  36-AS170036 VL1VH1-98I108S
QSALTQPRSVSGSPGQSVTISCAGTSSDVGSENYVSWYQQHPGKAPKLMIYQVNKRASGVPDRFSGSKSGNTASLTISGLQAEDEADYYCASYRSSDINIVFGGGTKLTVLGGGGSGGGGSGGGGSEVQLVESGGGLVQPGGSLRLSCAASGFTFSSYAMSWVRQAPGKGLEWVSTINSGTGSPYYADSVKGRFTISRDNSKNTLYLQMNSLRAEDTAVYYCAKNFFDGSWFLSPPAMDYWGQGTLVTVSS

SEQ ID NO: 249 - protein, 251 aa, Artificial Sequence
  37-AS170036 VL1VH1-98Q108A
QSALTQPRSVSGSPGQSVTISCAGTSSDVGSENYVSWYQQHPGKAPKLMIYQVNKRASGVPDRFSGSKSGNTASLTISGLQAEDEADYYCASYRSSDQNIVFGGGTKLTVLGGGGSGGGGSGGGGSEVQLVESGGGLVQPGGSLRLSCAASGFTFSSYAMSWVRQAPGKGLEWVSTINSGTGSPYYADSVKGRFTISRDNSKNTLYLQMNSLRAEDTAVYYCAKNFFDGSWFLAPPAMDYWGQGTLVTVSS

SEQ ID NO: 250 - protein, 251 aa, Artificial Sequence
  38-AS170036 VL1VH1-98Q108D
QSALTQPRSVSGSPGQSVTISCAGTSSDVGSENYVSWYQQHPGKAPKLMIYQVNKRASGVPDRFSGSKSGNTASLTISGLQAEDEADYYCASYRSSDQNIVFGGGTKLTVLGGGGSGGGGSGGGGSEVQLVESGGGLVQPGGSLRLSCAASGFTFSSYAMSWVRQAPGKGLEWVSTINSGTGSPYYADSVKGRFTISRDNSKNTLYLQMNSLRAEDTAVYYCAKNFFDGSWFLDPPAMDYWGQGTLVTVSS

SEQ ID NO: 251 - protein, 251 aa, Artificial Sequence
  39-AS170036 VL1VH1-98Q108S
QSALTQPRSVSGSPGQSVTISCAGTSSDVGSENYVSWYQQHPGKAPKLMIYQVNKRASGVPDRFSGSKSGNTASLTISGLQAEDEADYYCASYRSSDQNIVFGGGTKLTVLGGGGSGGGGSGGGGSEVQLVESGGGLVQPGGSLRLSCAASGFTFSSYAMSWVRQAPGKGLEWVSTINSGTGSPYYADSVKGRFTISRDNSKNTLYLQMNSLRAEDTAVYYCAKNFFDGSWFLSPPAMDYWGQGTLVTVSS

SEQ ID NO: 252 - protein, 251 aa, Artificial Sequence
  40-AS170036 VL1VH1-56Y98F108A
QSALTQPRSVSGSPGQSVTISCAGTSSDVGSENYVSWYQQHPGKAPKLMIYQVNKRASGVPDRFSGSKSGNTASLTISGLQAEDEADYYCASYRSSDFNIVFGGGTKLTVLGGGGSGGGGSGGGGSEVQLVESGGGLVQPGGSLRLSCAASGFTFSSYAMSWVRQAPGKGLEWVSTINSGTYSPYYADSVKGRFTISRDNSKNTLYLQMNSLRAEDTAVYYCAKNFFDGSWFLAPPAMDYWGQGTLVTVSS

SEQ ID NO: 253 - protein, 251 aa, Artificial Sequence
  41-AS170036 VL1VH1-56Y98F108D
QSALTQPRSVSGSPGQSVTISCAGTSSDVGSENYVSWYQQHPGKAPKLMIYQVNKRASGVPDRFSGSKSGNTASLTISGLQAEDEADYYCASYRSSDFNIVFGGGTKLTVLGGGGSGGGGSGGGGSEVQLVESGGGLVQPGGSLRLSCAASGFTFSSYAMSWVRQAPGKGLEWVSTINSGTYSPYYADSVKGRFTISRDNSKNTLYLQMNSLRAEDTAVYYCAKNFFDGSWFLDPPAMDYWGQGTLVTVSS

SEQ ID NO: 254 - protein, 251 aa, Artificial Sequence
  42-AS170036 VL1VH1-56Y98F108S
QSALTQPRSVSGSPGQSVTISCAGTSSDVGSENYVSWYQQHPGKAPKLMIYQVNKRASGVPDRFSGSKSGNTASLTISGLQAEDEADYYCASYRSSDFNIVFGGGTKLTVLGGGGSGGGGSGGGGSEVQLVESGGGLVQPGGSLRLSCAASGFTFSSYAMSWVRQAPGKGLEWVSTINSGTYSPYYADSVKGRFTISRDNSKNTLYLQMNSLRAEDTAVYYCAKNFFDGSWFLSPPAMDYWGQGTLVTVSS

SEQ ID NO: 255 - protein, 251 aa, Artificial Sequence
  43-AS170036 VL1VH1-56Y98I108A
QSALTQPRSVSGSPGQSVTISCAGTSSDVGSENYVSWYQQHPGKAPKLMIYQVNKRASGVPDRFSGSKSGNTASLTISGLQAEDEADYYCASYRSSDINIVFGGGTKLTVLGGGGSGGGGSGGGGSEVQLVESGGGLVQPGGSLRLSCAASGFTFSSYAMSWVRQAPGKGLEWVSTINSGTYSPYYADSVKGRFTISRDNSKNTLYLQMNSLRAEDTAVYYCAKNFFDGSWFLAPPAMDYWGQGTLVTVSS

SEQ ID NO: 256 - protein, 251 aa, Artificial Sequence
  44-AS170036 VL1VH1-56Y98I108D
QSALTQPRSVSGSPGQSVTISCAGTSSDVGSENYVSWYQQHPGKAPKLMIYQVNKRASGVPDRFSGSKSGNTASLTISGLQAEDEADYYCASYRSSDINIVFGGGTKLTVLGGGGSGGGGSGGGGSEVQLVESGGGLVQPGGSLRLSCAASGFTFSSYAMSWVRQAPGKGLEWVSTINSGTYSPYYADSVKGRFTISRDNSKNTLYLQMNSLRAEDTAVYYCAKNFFDGSWFLDPPAMDYWGQGTLVTVSS

SEQ ID NO: 257 - protein, 251 aa, Artificial Sequence
  45-AS170036 VL1VH1-56Y98I108S
QSALTQPRSVSGSPGQSVTISCAGTSSDVGSENYVSWYQQHPGKAPKLMIYQVNKRASGVPDRFSGSKSGNTASLTISGLQAEDEADYYCASYRSSDINIVFGGGTKLTVLGGGGSGGGGSGGGGSEVQLVESGGGLVQPGGSLRLSCAASGFTFSSYAMSWVRQAPGKGLEWVSTINSGTYSPYYADSVKGRFTISRDNSKNTLYLQMNSLRAEDTAVYYCAKNFFDGSWFLSPPAMDYWGQGTLVTVSS

SEQ ID NO: 258 - protein, 251 aa, Artificial Sequence
  46-AS170036 VL1VH1-56Y98Q108A
QSALTQPRSVSGSPGQSVTISCAGTSSDVGSENYVSWYQQHPGKAPKLMIYQVNKRASGVPDRFSGSKSGNTASLTISGLQAEDEADYYCASYRSSDQNIVFGGGTKLTVLGGGGSGGGGSGGGGSEVQLVESGGGLVQPGGSLRLSCAASGFTFSSYAMSWVRQAPGKGLEWVSTINSGTYSPYYADSVKGRFTISRDNSKNTLYLQMNSLRAEDTAVYYCAKNFFDGSWFLAPPAMDYWGQGTLVTVSS

SEQ ID NO: 259 - protein, 251 aa, Artificial Sequence
  47-AS170036 VL1VH1-56Y98Q108D
QSALTQPRSVSGSPGQSVTISCAGTSSDVGSENYVSWYQQHPGKAPKLMIYQVNKRASGVPDRFSGSKSGNTASLTISGLQAEDEADYYCASYRSSDQNIVFGGGTKLTVLGGGGSGGGGSGGGGSEVQLVESGGGLVQPGGSLRLSCAASGFTFSSYAMSWVRQAPGKGLEWVSTINSGTYSPYYADSVKGRFTISRDNSKNTLYLQMNSLRAEDTAVYYCAKNFFDGSWFLDPPAMDYWGQGTLVTVSS

SEQ ID NO: 260 - protein, 251 aa, Artificial Sequence
  48-AS170036 VL1VH1-56Y98Q108S
QSALTQPRSVSGSPGQSVTISCAGTSSDVGSENYVSWYQQHPGKAPKLMIYQVNKRASGVPDRFSGSKSGNTASLTISGLQAEDEADYYCASYRSSDQNIVFGGGTKLTVLGGGGSGGGGSGGGGSEVQLVESGGGLVQPGGSLRLSCAASGFTFSSYAMSWVRQAPGKGLEWVSTINSGTYSPYYADSVKGRFTISRDNSKNTLYLQMNSLRAEDTAVYYCAKNFFDGSWFLSPPAMDYWGQGTLVTVSS

SEQ ID NO: 261 - protein, 251 aa, Artificial Sequence
  49-AS170036 VL1VH1-56N98F108A
QSALTQPRSVSGSPGQSVTISCAGTSSDVGSENYVSWYQQHPGKAPKLMIYQVNKRASGVPDRFSGSKSGNTASLTISGLQAEDEADYYCASYRSSDFNIVFGGGTKLTVLGGGGSGGGGSGGGGSEVQLVESGGGLVQPGGSLRLSCAASGFTFSSYAMSWVRQAPGKGLEWVSTINSGTNSPYYADSVKGRFTISRDNSKNTLYLQMNSLRAEDTAVYYCAKNFFDGSWFLAPPAMDYWGQGTLVTVSS

SEQ ID NO: 262 - protein, 251 aa, Artificial Sequence
  50-AS170036 VL1VH1-56N98F108D
QSALTQPRSVSGSPGQSVTISCAGTSSDVGSENYVSWYQQHPGKAPKLMIYQVNKRASGVPDRFSGSKSGNTASLTISGLQAEDEADYYCASYRSSDFNIVFGGGTKLTVLGGGGSGGGGSGGGGSEVQLVESGGGLVQPGGSLRLSCAASGFTFSSYAMSWVRQAPGKGLEWVSTINSGTNSPYYADSVKGRFTISRDNSKNTLYLQMNSLRAEDTAVYYCAKNFFDGSWFLDPPAMDYWGQGTLVTVSS

SEQ ID NO: 263 - protein, 251 aa, Artificial Sequence
  51-AS170036 VL1VH1-56N98F108S
QSALTQPRSVSGSPGQSVTISCAGTSSDVGSENYVSWYQQHPGKAPKLMIYQVNKRASGVPDRFSGSKSGNTASLTISGLQAEDEADYYCASYRSSDFNIVFGGGTKLTVLGGGGSGGGGSGGGGSEVQLVESGGGLVQPGGSLRLSCAASGFTFSSYAMSWVRQAPGKGLEWVSTINSGTNSPYYADSVKGRFTISRDNSKNTLYLQMNSLRAEDTAVYYCAKNFFDGSWFLSPPAMDYWGQGTLVTVSS

SEQ ID NO: 264 - protein, 251 aa, Artificial Sequence
  52-AS170036 VL1VH1-56N98I108A
QSALTQPRSVSGSPGQSVTISCAGTSSDVGSENYVSWYQQHPGKAPKLMIYQVNKRASGVPDRFSGSKSGNTASLTISGLQAEDEADYYCASYRSSDINIVFGGGTKLTVLGGGGSGGGGSGGGGSEVQLVESGGGLVQPGGSLRLSCAASGFTFSSYAMSWVRQAPGKGLEWVSTINSGTNSPYYADSVKGRFTISRDNSKNTLYLQMNSLRAEDTAVYYCAKNFFDGSWFLAPPAMDYWGQGTLVTVSS

SEQ ID NO: 265 - protein, 251 aa, Artificial Sequence
  53-AS170036 VL1VH1-56N98I108D
QSALTQPRSVSGSPGQSVTISCAGTSSDVGSENYVSWYQQHPGKAPKLMIYQVNKRASGVPDRFSGSKSGNTASLTISGLQAEDEADYYCASYRSSDINIVFGGGTKLTVLGGGGSGGGGSGGGGSEVQLVESGGGLVQPGGSLRLSCAASGFTFSSYAMSWVRQAPGKGLEWVSTINSGTNSPYYADSVKGRFTISRDNSKNTLYLQMNSLRAEDTAVYYCAKNFFDGSWFLDPPAMDYWGQGTLVTVSS

SEQ ID NO: 266 - protein, 251 aa, Artificial Sequence
  54-AS170036 VL1VH1-56N98I108S
QSALTQPRSVSGSPGQSVTISCAGTSSDVGSENYVSWYQQHPGKAPKLMIYQVNKRASGVPDRFSGSKSGNTASLTISGLQAEDEADYYCASYRSSDINIVFGGGTKLTVLGGGGSGGGGSGGGGSEVQLVESGGGLVQPGGSLRLSCAASGFTFSSYAMSWVRQAPGKGLEWVSTINSGTNSPYYADSVKGRFTISRDNSKNTLYLQMNSLRAEDTAVYYCAKNFFDGSWFLSPPAMDYWGQGTLVTVSS

SEQ ID NO: 267 - protein, 251 aa, Artificial Sequence
  55-AS170036 VL1VH1-56N98Q108A
QSALTQPRSVSGSPGQSVTISCAGTSSDVGSENYVSWYQQHPGKAPKLMIYQVNKRASGVPDRFSGSKSGNTASLTISGLQAEDEADYYCASYRSSDQNIVFGGGTKLTVLGGGGSGGGGSGGGGSEVQLVESGGGLVQPGGSLRLSCAASGFTFSSYAMSWVRQAPGKGLEWVSTINSGTNSPYYADSVKGRFTISRDNSKNTLYLQMNSLRAEDTAVYYCAKNFFDGSWFLAPPAMDYWGQGTLVTVSS

SEQ ID NO: 268 - protein, 251 aa, Artificial Sequence
  56-AS170036 VL1VH1-56N98Q108D
QSALTQPRSVSGSPGQSVTISCAGTSSDVGSENYVSWYQQHPGKAPKLMIYQVNKRASGVPDRFSGSKSGNTASLTISGLQAEDEADYYCASYRSSDQNIVFGGGTKLTVLGGGGSGGGGSGGGGSEVQLVESGGGLVQPGGSLRLSCAASGFTFSSYAMSWVRQAPGKGLEWVSTINSGTNSPYYADSVKGRFTISRDNSKNTLYLQMNSLRAEDTAVYYCAKNFFDGSWFLDPPAMDYWGQGTLVTVSS

SEQ ID NO: 269 - protein, 251 aa, Artificial Sequence
  57-AS170036 VL1VH1-56N98Q108S
QSALTQPRSVSGSPGQSVTISCAGTSSDVGSENYVSWYQQHPGKAPKLMIYQVNKRASGVPDRFSGSKSGNTASLTISGLQAEDEADYYCASYRSSDQNIVFGGGTKLTVLGGGGSGGGGSGGGGSEVQLVESGGGLVQPGGSLRLSCAASGFTFSSYAMSWVRQAPGKGLEWVSTINSGTNSPYYADSVKGRFTISRDNSKNTLYLQMNSLRAEDTAVYYCAKNFFDGSWFLSPPAMDYWGQGTLVTVSS

SEQ ID NO: 270 - protein, 251 aa, Artificial Sequence
  58-AS170036 VL1VH1-57H98F108A
QSALTQPRSVSGSPGQSVTISCAGTSSDVGSENYVSWYQQHPGKAPKLMIYQVNKRASGVPDRFSGSKSGNTASLTISGLQAEDEADYYCASYRSSDFNIVFGGGTKLTVLGGGGSGGGGSGGGGSEVQLVESGGGLVQPGGSLRLSCAASGFTFSSYAMSWVRQAPGKGLEWVSTINSGTGHPYYADSVKGRFTISRDNSKNTLYLQMNSLRAEDTAVYYCAKNFFDGSWFLAPPAMDYWGQGTLVTVSS

SEQ ID NO: 271 - protein, 251 aa, Artificial Sequence
  59-AS170036 VL1VH1-57H98F108D
QSALTQPRSVSGSPGQSVTISCAGTSSDVGSENYVSWYQQHPGKAPKLMIYQVNKRASGVPDRFSGSKSGNTASLTISGLQAEDEADYYCASYRSSDFNIVFGGGTKLTVLGGGGSGGGGSGGGGSEVQLVESGGGLVQPGGSLRLSCAASGFTFSSYAMSWVRQAPGKGLEWVSTINSGTGHPYYADSVKGRFTISRDNSKNTLYLQMNSLRAEDTAVYYCAKNFFDGSWFLDPPAMDYWGQGTLVTVSS

SEQ ID NO: 272 - protein, 251 aa, Artificial Sequence
  60-AS170036 VL1VH1-57H98F108S
QSALTQPRSVSGSPGQSVTISCAGTSSDVGSENYVSWYQQHPGKAPKLMIYQVNKRASGVPDRFSGSKSGNTASLTISGLQAEDEADYYCASYRSSDFNIVFGGGTKLTVLGGGGSGGGGSGGGGSEVQLVESGGGLVQPGGSLRLSCAASGFTFSSYAMSWVRQAPGKGLEWVSTINSGTGHPYYADSVKGRFTISRDNSKNTLYLQMNSLRAEDTAVYYCAKNFFDGSWFLSPPAMDYWGQGTLVTVSS

SEQ ID NO: 273 - protein, 251 aa, Artificial Sequence
  61-AS170036 VL1VH1-57H98I108A
QSALTQPRSVSGSPGQSVTISCAGTSSDVGSENYVSWYQQHPGKAPKLMIYQVNKRASGVPDRFSGSKSGNTASLTISGLQAEDEADYYCASYRSSDINIVFGGGTKLTVLGGGGSGGGGSGGGGSEVQLVESGGGLVQPGGSLRLSCAASGFTFSSYAMSWVRQAPGKGLEWVSTINSGTGHPYYADSVKGRFTISRDNSKNTLYLQMNSLRAEDTAVYYCAKNFFDGSWFLAPPAMDYWGQGTLVTVSS

SEQ ID NO: 274 - protein, 251 aa, Artificial Sequence
  62-AS170036 VL1VH1-57H98I108D
QSALTQPRSVSGSPGQSVTISCAGTSSDVGSENYVSWYQQHPGKAPKLMIYQVNKRASGVPDRFSGSKSGNTASLTISGLQAEDEADYYCASYRSSDINIVFGGGTKLTVLGGGGSGGGGSGGGGSEVQLVESGGGLVQPGGSLRLSCAASGFTFSSYAMSWVRQAPGKGLEWVSTINSGTGHPYYADSVKGRFTISRDNSKNTLYLQMNSLRAEDTAVYYCAKNFFDGSWFLDPPAMDYWGQGTLVTVSS

SEQ ID NO: 275 - protein, 251 aa, Artificial Sequence
  63-AS170036 VL1VH1-57H98I108S
QSALTQPRSVSGSPGQSVTISCAGTSSDVGSENYVSWYQQHPGKAPKLMIYQVNKRASGVPDRFSGSKSGNTASLTISGLQAEDEADYYCASYRSSDINIVFGGGTKLTVLGGGGSGGGGSGGGGSEVQLVESGGGLVQPGGSLRLSCAASGFTFSSYAMSWVRQAPGKGLEWVSTINSGTGHPYYADSVKGRFTISRDNSKNTLYLQMNSLRAEDTAVYYCAKNFFDGSWFLSPPAMDYWGQGTLVTVSS

SEQ ID NO: 276 - protein, 251 aa, Artificial Sequence
  64-AS170036 VL1VH1-57H98Q108A
QSALTQPRSVSGSPGQSVTISCAGTSSDVGSENYVSWYQQHPGKAPKLMIYQVNKRASGVPDRFSGSKSGNTASLTISGLQAEDEADYYCASYRSSDQNIVFGGGTKLTVLGGGGSGGGGSGGGGSEVQLVESGGGLVQPGGSLRLSCAASGFTFSSYAMSWVRQAPGKGLEWVSTINSGTGHPYYADSVKGRFTISRDNSKNTLYLQMNSLRAEDTAVYYCAKNFFDGSWFLAPPAMDYWGQGTLVTVSS

SEQ ID NO: 277 - protein, 251 aa, Artificial Sequence
  65-AS170036 VL1VH1-57H98Q108D
QSALTQPRSVSGSPGQSVTISCAGTSSDVGSENYVSWYQQHPGKAPKLMIYQVNKRASGVPDRFSGSKSGNTASLTISGLQAEDEADYYCASYRSSDQNIVFGGGTKLTVLGGGGSGGGGSGGGGSEVQLVESGGGLVQPGGSLRLSCAASGFTFSSYAMSWVRQAPGKGLEWVSTINSGTGHPYYADSVKGRFTISRDNSKNTLYLQMNSLRAEDTAVYYCAKNFFDGSWFLDPPAMDYWGQGTLVTVSS

SEQ ID NO: 278 - protein, 251 aa, Artificial Sequence
  66-AS170036 VL1VH1-57H98Q108S
QSALTQPRSVSGSPGQSVTISCAGTSSDVGSENYVSWYQQHPGKAPKLMIYQVNKRASGVPDRFSGSKSGNTASLTISGLQAEDEADYYCASYRSSDQNIVFGGGTKLTVLGGGGSGGGGSGGGGSEVQLVESGGGLVQPGGSLRLSCAASGFTFSSYAMSWVRQAPGKGLEWVSTINSGTGHPYYADSVKGRFTISRDNSKNTLYLQMNSLRAEDTAVYYCAKNFFDGSWFLSPPAMDYWGQGTLVTVSS

SEQ ID NO: 279 - protein, 251 aa, Artificial Sequence
  67-AS170036 VL1VH1-57K98F108A
QSALTQPRSVSGSPGQSVTISCAGTSSDVGSENYVSWYQQHPGKAPKLMIYQVNKRASGVPDRFSGSKSGNTASLTISGLQAEDEADYYCASYRSSDFNIVFGGGTKLTVLGGGGSGGGGSGGGGSEVQLVESGGGLVQPGGSLRLSCAASGFTFSSYAMSWVRQAPGKGLEWVSTINSGTGKPYYADSVKGRFTISRDNSKNTLYLQMNSLRAEDTAVYYCAKNFFDGSWFLAPPAMDYWGQGTLVTVSS

SEQ ID NO: 280 - protein, 251 aa, Artificial Sequence
  68-AS170036 VL1VH1-57K98F108D
QSALTQPRSVSGSPGQSVTISCAGTSSDVGSENYVSWYQQHPGKAPKLMIYQVNKRASGVPDRFSGSKSGNTASLTISGLQAEDEADYYCASYRSSDFNIVFGGGTKLTVLGGGGSGGGGSGGGGSEVQLVESGGGLVQPGGSLRLSCAASGFTFSSYAMSWVRQAPGKGLEWVSTINSGTGKPYYADSVKGRFTISRDNSKNTLYLQMNSLRAEDTAVYYCAKNFFDGSWFLDPPAMDYWGQGTLVTVSS

SEQ ID NO: 281 - protein, 251 aa, Artificial Sequence
  69-AS170036 VL1VH1-57K98F108S
QSALTQPRSVSGSPGQSVTISCAGTSSDVGSENYVSWYQQHPGKAPKLMIYQVNKRASGVPDRFSGSKSGNTASLTISGLQAEDEADYYCASYRSSDFNIVFGGGTKLTVLGGGGSGGGGSGGGGSEVQLVESGGGLVQPGGSLRLSCAASGFTFSSYAMSWVRQAPGKGLEWVSTINSGTGKPYYADSVKGRFTISRDNSKNTLYLQMNSLRAEDTAVYYCAKNFFDGSWFLSPPAMDYWGQGTLVTVSS

SEQ ID NO: 282 - protein, 251 aa, Artificial Sequence
  70-AS170036 VL1VH1-57K98I108A
QSALTQPRSVSGSPGQSVTISCAGTSSDVGSENYVSWYQQHPGKAPKLMIYQVNKRASGVPDRFSGSKSGNTASLTISGLQAEDEADYYCASYRSSDINIVFGGGTKLTVLGGGGSGGGGSGGGGSEVQLVESGGGLVQPGGSLRLSCAASGFTFSSYAMSWVRQAPGKGLEWVSTINSGTGKPYYADSVKGRFTISRDNSKNTLYLQMNSLRAEDTAVYYCAKNFFDGSWFLAPPAMDYWGQGTLVTVSS

SEQ ID NO: 283 - protein, 251 aa, Artificial Sequence
  71-AS170036 VL1VH1-57K98I108D
QSALTQPRSVSGSPGQSVTISCAGTSSDVGSENYVSWYQQHPGKAPKLMIYQVNKRASGVPDRFSGSKSGNTASLTISGLQAEDEADYYCASYRSSDINIVFGGGTKLTVLGGGGSGGGGSGGGGSEVQLVESGGGLVQPGGSLRLSCAASGFTFSSYAMSWVRQAPGKGLEWVSTINSGTGKPYYADSVKGRFTISRDNSKNTLYLQMNSLRAEDTAVYYCAKNFFDGSWFLDPPAMDYWGQGTLVTVSS

SEQ ID NO: 284 - protein, 251 aa, Artificial Sequence
  72-AS170036 VL1VH1-57K98I108S
QSALTQPRSVSGSPGQSVTISCAGTSSDVGSENYVSWYQQHPGKAPKLMIYQVNKRASGVPDRFSGSKSGNTASLTISGLQAEDEADYYCASYRSSDINIVFGGGTKLTVLGGGGSGGGGSGGGGSEVQLVESGGGLVQPGGSLRLSCAASGFTFSSYAMSWVRQAPGKGLEWVSTINSGTGKPYYADSVKGRFTISRDNSKNTLYLQMNSLRAEDTAVYYCAKNFFDGSWFLSPPAMDYWGQGTLVTVSS

SEQ ID NO: 285 - protein, 251 aa, Artificial Sequence
  73-AS170036 VL1VH1-57K98Q108A
QSALTQPRSVSGSPGQSVTISCAGTSSDVGSENYVSWYQQHPGKAPKLMIYQVNKRASGVPDRFSGSKSGNTASLTISGLQAEDEADYYCASYRSSDQNIVFGGGTKLTVLGGGGSGGGGSGGGGSEVQLVESGGGLVQPGGSLRLSCAASGFTFSSYAMSWVRQAPGKGLEWVSTINSGTGKPYYADSVKGRFTISRDNSKNTLYLQMNSLRAEDTAVYYCAKNFFDGSWFLAPPAMDYWGQGTLVTVSS

SEQ ID NO: 286 - protein, 251 aa, Artificial Sequence
  74-AS170036 VL1VH1-57K98Q108D
QSALTQPRSVSGSPGQSVTISCAGTSSDVGSENYVSWYQQHPGKAPKLMIYQVNKRASGVPDRFSGSKSGNTASLTISGLQAEDEADYYCASYRSSDQNIVFGGGTKLTVLGGGGSGGGGSGGGGSEVQLVESGGGLVQPGGSLRLSCAASGFTFSSYAMSWVRQAPGKGLEWVSTINSGTGKPYYADSVKGRFTISRDNSKNTLYLQMNSLRAEDTAVYYCAKNFFDGSWFLDPPAMDYWGQGTLVTVSS

SEQ ID NO: 287 - protein, 251 aa, Artificial Sequence
  75-AS170036 VL1VH1-57K98Q108S
QSALTQPRSVSGSPGQSVTISCAGTSSDVGSENYVSWYQQHPGKAPKLMIYQVNKRASGVPDRFSGSKSGNTASLTISGLQAEDEADYYCASYRSSDQNIVFGGGTKLTVLGGGGSGGGGSGGGGSEVQLVESGGGLVQPGGSLRLSCAASGFTFSSYAMSWVRQAPGKGLEWVSTINSGTGKPYYADSVKGRFTISRDNSKNTLYLQMNSLRAEDTAVYYCAKNFFDGSWFLSPPAMDYWGQGTLVTVSS

SEQ ID NO: 288 - protein, 251 aa, Artificial Sequence
  76-AS170036 VL1VH1-57M98F108A
QSALTQPRSVSGSPGQSVTISCAGTSSDVGSENYVSWYQQHPGKAPKLMIYQVNKRASGVPDRFSGSKSGNTASLTISGLQAEDEADYYCASYRSSDFNIVFGGGTKLTVLGGGGSGGGGSGGGGSEVQLVESGGGLVQPGGSLRLSCAASGFTFSSYAMSWVRQAPGKGLEWVSTINSGTGMPYYADSVKGRFTISRDNSKNTLYLQMNSLRAEDTAVYYCAKNFFDGSWFLAPPAMDYWGQGTLVTVSS

SEQ ID NO: 289 - protein, 251 aa, Artificial Sequence
  77-AS170036 VL1VH1-57M98F108D
QSALTQPRSVSGSPGQSVTISCAGTSSDVGSENYVSWYQQHPGKAPKLMIYQVNKRASGVPDRFSGSKSGNTASLTISGLQAEDEADYYCASYRSSDFNIVFGGGTKLTVLGGGGSGGGGSGGGGSEVQLVESGGGLVQPGGSLRLSCAASGFTFSSYAMSWVRQAPGKGLEWVSTINSGTGMPYYADSVKGRFTISRDNSKNTLYLQMNSLRAEDTAVYYCAKNFFDGSWFLDPPAMDYWGQGTLVTVSS

SEQ ID NO: 290 - protein, 251 aa, Artificial Sequence
  78-AS170036 VL1VH1-57M98F108S
QSALTQPRSVSGSPGQSVTISCAGTSSDVGSENYVSWYQQHPGKAPKLMIYQVNKRASGVPDRFSGSKSGNTASLTISGLQAEDEADYYCASYRSSDFNIVFGGGTKLTVLGGGGSGGGGSGGGGSEVQLVESGGGLVQPGGSLRLSCAASGFTFSSYAMSWVRQAPGKGLEWVSTINSGTGMPYYADSVKGRFTISRDNSKNTLYLQMNSLRAEDTAVYYCAKNFFDGSWFLSPPAMDYWGQGTLVTVSS

SEQ ID NO: 291 - protein, 251 aa, Artificial Sequence
  79-AS170036 VL1VH1-57M98I108A
QSALTQPRSVSGSPGQSVTISCAGTSSDVGSENYVSWYQQHPGKAPKLMIYQVNKRASGVPDRFSGSKSGNTASLTISGLQAEDEADYYCASYRSSDINIVFGGGTKLTVLGGGGSGGGGSGGGGSEVQLVESGGGLVQPGGSLRLSCAASGFTFSSYAMSWVRQAPGKGLEWVSTINSGTGMPYYADSVKGRFTISRDNSKNTLYLQMNSLRAEDTAVYYCAKNFFDGSWFLAPPAMDYWGQGTLVTVSS

SEQ ID NO: 292 - protein, 251 aa, Artificial Sequence
  80-AS170036 VL1VH1-57M98I108D
QSALTQPRSVSGSPGQSVTISCAGTSSDVGSENYVSWYQQHPGKAPKLMIYQVNKRASGVPDRFSGSKSGNTASLTISGLQAEDEADYYCASYRSSDINIVFGGGTKLTVLGGGGSGGGGSGGGGSEVQLVESGGGLVQPGGSLRLSCAASGFTFSSYAMSWVRQAPGKGLEWVSTINSGTGMPYYADSVKGRFTISRDNSKNTLYLQMNSLRAEDTAVYYCAKNFFDGSWFLDPPAMDYWGQGTLVTVSS

SEQ ID NO: 293 - protein, 251 aa, Artificial Sequence
  81-AS170036 VL1VH1-57M98I108S
QSALTQPRSVSGSPGQSVTISCAGTSSDVGSENYVSWYQQHPGKAPKLMIYQVNKRASGVPDRFSGSKSGNTASLTISGLQAEDEADYYCASYRSSDINIVFGGGTKLTVLGGGGSGGGGSGGGGSEVQLVESGGGLVQPGGSLRLSCAASGFTFSSYAMSWVRQAPGKGLEWVSTINSGTGMPYYADSVKGRFTISRDNSKNTLYLQMNSLRAEDTAVYYCAKNFFDGSWFLSPPAMDYWGQGTLVTVSS

SEQ ID NO: 294 - protein, 251 aa, Artificial Sequence
  82-AS170036 VL1VH1-57M98Q108A
QSALTQPRSVSGSPGQSVTISCAGTSSDVGSENYVSWYQQHPGKAPKLMIYQVNKRASGVPDRFSGSKSGNTASLTISGLQAEDEADYYCASYRSSDQNIVFGGGTKLTVLGGGGSGGGGSGGGGSEVQLVESGGGLVQPGGSLRLSCAASGFTFSSYAMSWVRQAPGKGLEWVSTINSGTGMPYYADSVKGRFTISRDNSKNTLYLQMNSLRAEDTAVYYCAKNFFDGSWFLAPPAMDYWGQGTLVTVSS

SEQ ID NO: 295 - protein, 251 aa, Artificial Sequence
  83-AS170036 VL1VH1-57M98Q108D
QSALTQPRSVSGSPGQSVTISCAGTSSDVGSENYVSWYQQHPGKAPKLMIYQVNKRASGVPDRFSGSKSGNTASLTISGLQAEDEADYYCASYRSSDQNIVFGGGTKLTVLGGGGSGGGGSGGGGSEVQLVESGGGLVQPGGSLRLSCAASGFTFSSYAMSWVRQAPGKGLEWVSTINSGTGMPYYADSVKGRFTISRDNSKNTLYLQMNSLRAEDTAVYYCAKNFFDGSWFLDPPAMDYWGQGTLVTVSS

SEQ ID NO: 296 - protein, 251 aa, Artificial Sequence
  84-AS170036 VL1VH1-57M98Q108S
QSALTQPRSVSGSPGQSVTISCAGTSSDVGSENYVSWYQQHPGKAPKLMIYQVNKRASGVPDRFSGSKSGNTASLTISGLQAEDEADYYCASYRSSDQNIVFGGGTKLTVLGGGGSGGGGSGGGGSEVQLVESGGGLVQPGGSLRLSCAASGFTFSSYAMSWVRQAPGKGLEWVSTINSGTGMPYYADSVKGRFTISRDNSKNTLYLQMNSLRAEDTAVYYCAKNFFDGSWFLSPPAMDYWGQGTLVTVSS

SEQ ID NO: 297 - protein, 505 aa, Artificial Sequence
  AS170036-TCE
QLVLTQPSSVSGTPGQTVTISCAGTSSDVGSENYVSWYRQLPGTAPKLLIYQVNKRASGIADRFSGSKSGNTASMTISGLQSADEADYYCASYRSSDHNIVFGGGTHLTVLGGGGSGGGGSGGGGSAVQLVESGGGLVQPGGSLRLSCTASGFTFSSYAMSWVRQAPGKGLEWVSTINSGTGSPYYADSVKGRFTISRDNAKNTLYLQLNSLKTEDTAMYYCAKNFFDGSWFLGPPAMDYWGKGTLVTISSGGGGSDIKLQQSGAELARPGASVKMSCKTSGYTFTRYTMHWVKQRPGQGLEWIGYINPSRGYTNYNQKFKDKATLTTDKSSSTAYMQLSSLTSEDSAVYYCARYYDDHYCLDYWGQGTTLTVSSVEGGSGGSGGSGGSGGVDDIQLTQSPAIMSASPGEKVTMTCRASSSVSYMNWYQQKSGTSPKRWIYDTSKVASGVPYRFSGSGSGTSYSLTISSMEAEDAATYYCQQWSSNPLTFGAGTKLELKHHHHHH

SEQ ID NO: 298 - protein, 505 aa, Artificial Sequence
  AS170036 VL1VH1-TCE
QSALTQPRSVSGSPGQSVTISCAGTSSDVGSENYVSWYQQHPGKAPKLMIYQVNKRASGVPDRFSGSKSGNTASLTISGLQAEDEADYYCASYRSSDHNIVFGGGTKLTVLGGGGSGGGGSGGGGSEVQLVESGGGLVQPGGSLRLSCAASGFTFSSYAMSWVRQAPGKGLEWVSTINSGTGSPYYADSVKGRFTISRDNSKNTLYLQMNSLRAEDTAVYYCAKNFFDGSWFLGPPAMDYWGQGTLVTVSSGGGGSDIKLQQSGAELARPGASVKMSCKTSGYTFTRYTMHWVKQRPGQGLEWIGYINPSRGYTNYNQKFKDKATLTTDKSSSTAYMQLSSLTSEDSAVYYCARYYDDHYCLDYWGQGTTLTVSSVEGGSGGSGGSGGSGGVDDIQLTQSPAIMSASPGEKVTMTCRASSSVSYMNWYQQKSGTSPKRWIYDTSKVASGVPYRFSGSGSGTSYSLTISSMEAEDAATYYCQQWSSNPLTFGAGTKLELKHHHHHH

SEQ ID NO: 299 - protein, 499 aa, Artificial Sequence
  AS179723-TCE
QAGLTQPPSMSGSPRQSVTISCTGSSNNIGGNYVNWYQHLPGTAPKLLIYDNKNRPSGVPEQISGSKSGSSASLTITGLQAEDEGDYYCASWDDSLSAVVFGGGTHLTVLGGGGSGGGGSGGGGSEVQLVESGGGLVQPGGSLRLSCAASGFTFLNYAMSWVRQAPGKGLEWVSSNSGAGSTYYSDSVKGRFTISRDYAKNVVYLQLNSLKTEDTGMYYCAKGTNVGSWSSLHYWGQGTQVTVSSGGGGSDIKLQQSGAELARPGASVKMSCKTSGYTFTRYTMHWVKQRPGQGLEWIGYINPSRGYTNYNQKFKDKATLTTDKSSSTAYMQLSSLTSEDSAVYYCARYYDDHYCLDYWGQGTTLTVSSVEGGSGGSGGSGGSGGVDDIQLTQSPAIMSASPGEKVTMTCRASSSVSYMNWYQQKSGTSPKRWIYDTSKVASGVPYRFSGSGSGTSYSLTISSMEAEDAATYYCQQWSSNPLTFGAGTKLELKHHHHHH

SEQ ID NO: 300 - protein, 499 aa, Artificial Sequence
  AS179732-TCE
NFMLTQPPSMSGSPRQSVTISCTGSSSNIGGNYVNWYQHLPGTAPKLLIYDNSNRASGVPERFSGSKSGSSASLTITGLQAEDEGDYYCASWDDSLSGAVFGGGTHLTVLGGGGSGGGGSGGGGSEVQLVESGGGLVQPGGSLRLSCAASGFTFLNYAMSWVRQAPGKGLEWVSSNSGAGSTYYSDSVKGRFTISRDYAKNVVYLQLNSLKTEDTGMYYCAKGTNVGSWSSLHYWGQGTQVTVSSGGGGSDIKLQQSGAELARPGASVKMSCKTSGYTFTRYTMHWVKQRPGQGLEWIGYINPSRGYTNYNQKFKDKATLTTDKSSSTAYMQLSSLTSEDSAVYYCARYYDDHYCLDYWGQGTTLTVSSVEGGSGGSGGSGGSGGVDDIQLTQSPAIMSASPGEKVTMTCRASSSVSYMNWYQQKSGTSPKRWIYDTSKVASGVPYRFSGSGSGTSYSLTISSMEAEDAATYYCQQWSSNPLTFGAGTKLELKHHHHHH

SEQ ID NO: 301 - protein, 504 aa, Artificial Sequence
  Blinatumomab-TCE
DIQLTQSPASLAVSLGQRATISCKASQSVDYDGDSYLNWYQQIPGQPPKLLIYDASNLVSGIPPRFSGSGSGTDFTLNIHPVEKVDAATYHCQQSTEDPWTFGGGTKLEIKGGGGSGGGGSGGGGSQVQLQQSGAELVRPGSSVKISCKASGYAFSSYWMNWVKQRPGQGLEWIGQIWPGDGDTNYNGKFKGKATLTADESSSTAYMQLSSLASEDSAVYFCARRETTTVGRYYYAMDYWGQGTTVTVSSGGGGSDIKLQQSGAELARPGASVKMSCKTSGYTFTRYTMHWVKQRPGQGLEWIGYINPSRGYTNYNQKFKDKATLTTDKSSSTAYMQLSSLTSEDSAVYYCARYYDDHYCLDYWGQGTTLTVSSVEGGSGGSGGSGGSGGVDDIQLTQSPAIMSASPGEKVTMTCRASSSVSYMNWYQQKSGTSPKRWIYDTSKVASGVPYRFSGSGSGTSYSLTISSMEAEDAATYYCQQWSSNPLTFGAGTKLELKHHHHHH

SEQ ID NO: 302 - protein, 994 aa, Artificial Sequence
  AS170036 VL1VH1-TCE-HLE
QSALTQPRSVSGSPGQSVTISCAGTSSDVGSENYVSWYQQHPGKAPKLMIYQVNKRASGVPDRFSGSKSGNTASLTISGLQAEDEADYYCASYRSSDHNIVFGGGTKLTVLGGGGSGGGGSGGGGSEVQLVESGGGLVQPGGSLRLSCAASGFTFSSYAMSWVRQAPGKGLEWVSTINSGTGSPYYADSVKGRFTISRDNSKNTLYLQMNSLRAEDTAVYYCAKNFFDGSWFLGPPAMDYWGQGTLVTVSSSGGGGSEVQLVESGGGLVQPGGSLKLSCAASGFTFNKYAMNWVRQAPGKGLEWVARIRSKYNNYATYYADSVKDRFTISRDDSKNTAYLQMNNLKTEDTAVYYCVRHGNFGNSYISYWAYWGQGTLVTVSSGGGGSGGGGSGGGGSQTVVTQEPSLTVSPGGTVTLTCGSSTGAVTSGNYPNWVQQKPGQAPRGLIGGTKFLAPGTPARFSGSLLGGKAALTLSGVQPEDEAEYYCVLWYSNRWVFGGGTKLTVLGGGGDKTHTCPPCPAPELLGGPSVFLFPPKPKDTLMISRTPEVTCVVVDVSHEDPEVKFNWYVDGVEVHNAKTKPCEEQYGSTYRCVSVLTVLHQDWLNGKEYKCKVSNKALPAPIEKTISKAKGQPREPQVYTLPPSREEMTKNQVSLTCLVKGFYPSDIAVEWESNGQPENNYKTTPPVLDSDGSFFLYSKLTVDKSRWQQGNVFSCSVMHEALHNHYTQKSLSLSPGKGGGGSGGGGSGGGGSGGGGSGGGGSGGGGSDKTHTCPPCPAPELLGGPSVFLFPPKPKDTLMISRTPEVTCVVVDVSHEDPEVKFNWYVDGVEVHNAKTKPCEEQYGSTYRCVSVLTVLHQDWLNGKEYKCKVSNKALPAPIEKTISKAKGQPREPQVYTLPPSREEMTKNQVSLTCLVKGFYPSDIAVEWESNGQPENNYKTTPPVLDSDGSFFLYSKLTVDKSRWQQGNVFSCSVMHEALHNHYTQKSLSLSPGK

SEQ ID NO: 303 - protein, 988 aa, Artificial Sequence
  AS179723 VL1g1VH1g1-N73Y-TCE-HLE
QSVLTQPPSASGTPGQRVTISCSGSSNNIGGNYVNWYQQLPGTAPKLLIYDNKNRPSGVPDRFSGSKSGTSASLAISGLQSEDEADYYCASWDDSLSAVVFGGGTKLTVLGGGGSGGGGSGGGGSEVQLVESGGGLVQPGGSLRLSCAASGFTFLNYAMSWVRQAPGKGLEWVSSNSGAGSTYYADSVKGRFTISRDYSKNTLYLQMNSLRAEDTAVYYCAKGTNVGSWSSLHYWGQGTLVTVSSSGGGGSEVQLVESGGGLVQPGGSLKLSCAASGFTFNKYAMNWVRQAPGKGLEWVARIRSKYNNYATYYADSVKDRFTISRDDSKNTAYLQMNNLKTEDTAVYYCVRHGNFGNSYISYWAYWGQGTLVTVSSGGGGSGGGGSGGGGSQTVVTQEPSLTVSPGGTVTLTCGSSTGAVTSGNYPNWVQQKPGQAPRGLIGGTKFLAPGTPARFSGSLLGGKAALTLSGVQPEDEAEYYCVLWYSNRWVFGGGTKLTVLGGGGDKTHTCPPCPAPELLGGPSVFLFPPKPKDTLMISRTPEVTCVVVDVSHEDPEVKFNWYVDGVEVHNAKTKPCEEQYGSTYRCVSVLTVLHQDWLNGKEYKCKVSNKALPAPIEKTISKAKGQPREPQVYTLPPSREEMTKNQVSLTCLVKGFYPSDIAVEWESNGQPENNYKTTPPVLDSDGSFFLYSKLTVDKSRWQQGNVFSCSVMHEALHNHYTQKSLSLSPGKGGGGSGGGGSGGGGSGGGGSGGGGSGGGGSDKTHTCPPCPAPELLGGPSVFLFPPKPKDTLMISRTPEVTCVVVDVSHEDPEVKFNWYVDGVEVHNAKTKPCEEQYGSTYRCVSVLTVLHQDWLNGKEYKCKVSNKALPAPIEKTISKAKGQPREPQVYTLPPSREEMTKNQVSLTCLVKGFYPSDIAVEWESNGQPENNYKTTPPVLDSDGSFFLYSKLTVDKSRWQQGNVFSCSVMHEALHNHYTQKSLSLSPGK

SEQ ID NO: 304 - protein, 988 aa, Artificial Sequence
  AS179732 VL1g1VH1g1-N73Y-TCE-HLE
QSVLTQPPSASGTPGQRVTISCSGSSSNIGGNYVNWYQQLPGTAPKLLIYDNSNRASGVPDRFSGSKSGTSASLAISGLQSEDEADYYCASWDDSLSGAVFGGGTKLTVLGGGGSGGGGSGGGGSEVQLVESGGGLVQPGGSLRLSCAASGFTFLNYAMSWVRQAPGKGLEWVSSNSGAGSTYYADSVKGRFTISRDYSKNTLYLQMNSLRAEDTAVYYCAKGTNVGSWSSLHYWGQGTLVTVSSSGGGGSEVQLVESGGGLVQPGGSLKLSCAASGFTFNKYAMNWVRQAPGKGLEWVARIRSKYNNYATYYADSVKDRFTISRDDSKNTAYLQMNNLKTEDTAVYYCVRHGNFGNSYISYWAYWGQGTLVTVSSGGGGSGGGGSGGGGSQTVVTQEPSLTVSPGGTVTLTCGSSTGAVTSGNYPNWVQQKPGQAPRGLIGGTKFLAPGTPARFSGSLLGGKAALTLSGVQPEDEAEYYCVLWYSNRWVFGGGTKLTVLGGGGDKTHTCPPCPAPELLGGPSVFLFPPKPKDTLMISRTPEVTCVVVDVSHEDPEVKFNWYVDGVEVHNAKTKPCEEQYGSTYRCVSVLTVLHQDWLNGKEYKCKVSNKALPAPIEKTISKAKGQPREPQVYTLPPSREEMTKNQVSLTCLVKGFYPSDIAVEWESNGQPENNYKTTPPVLDSDGSFFLYSKLTVDKSRWQQGNVFSCSVMHEALHNHYTQKSLSLSPGKGGGGSGGGGSGGGGSGGGGSGGGGSGGGGSDKTHTCPPCPAPELLGGPSVFLFPPKPKDTLMISRTPEVTCVVVDVSHEDPEVKFNWYVDGVEVHNAKTKPCEEQYGSTYRCVSVLTVLHQDWLNGKEYKCKVSNKALPAPIEKTISKAKGQPREPQVYTLPPSREEMTKNQVSLTCLVKGFYPSDIAVEWESNGQPENNYKTTPPVLDSDGSFFLYSKLTVDKSRWQQGNVFSCSVMHEALHNHYTQKSLSLSPGK

SEQ ID NO: 305 - protein, 989 aa, Artificial Sequence
  AS190259 VL1VH1-TCE-HLE
SSELTQDPAVSVALGQTVRITCQGGGYYVNWYQQKPGQAPVLVIYLNTNRPSGIPDRFSGSSSGNTASLTITGAQAEDEADYYCQSADSSGNSAVFGGGTKLTVLGGGGSGGGGSGGGGSEVQLVESGGGLVQPGGSLRLSCAASGFTFSSYAMSWVRQAPGKGLEWVSAINSGGGSTYYADSVKGRFTISRDNSKNTLYLQMNSLRAEDTAVYYCAKAASGYGGSWWGDATLDAWGQGTLVTVSSSGGGGSEVQLVESGGGLVQPGGSLKLSCAASGFTFNKYAMNWVRQAPGKGLEWVARIRSKYNNYATYYADSVKDRFTISRDDSKNTAYLQMNNLKTEDTAVYYCVRHGNFGNSYISYWAYWGQGTLVTVSSGGGGSGGGGSGGGGSQTVVTQEPSLTVSPGGTVTLTCGSSTGAVTSGNYPNWVQQKPGQAPRGLIGGTKFLAPGTPARFSGSLLGGKAALTLSGVQPEDEAEYYCVLWYSNRWVFGGGTKLTVLGGGGDKTHTCPPCPAPELLGGPSVFLFPPKPKDTLMISRTPEVTCVVVDVSHEDPEVKFNWYVDGVEVHNAKTKPCEEQYGSTYRCVSVLTVLHQDWLNGKEYKCKVSNKALPAPIEKTISKAKGQPREPQVYTLPPSREEMTKNQVSLTCLVKGFYPSDIAVEWESNGQPENNYKTTPPVLDSDGSFFLYSKLTVDKSRWQQGNVFSCSVMHEALHNHYTQKSLSLSPGKGGGGSGGGGSGGGGSGGGGSGGGGSGGGGSDKTHTCPPCPAPELLGGPSVFLFPPKPKDTLMISRTPEVTCVVVDVSHEDPEVKFNWYVDGVEVHNAKTKPCEEQYGSTYRCVSVLTVLHQDWLNGKEYKCKVSNKALPAPIEKTISKAKGQPREPQVYTLPPSREEMTKNQVSLTCLVKGFYPSDIAVEWESNGQPENNYKTTPPVLDSDGSFFLYSKLTVDKSRWQQGNVFSCSVMHEALHNHYTQKSLSLSPGK

SEQ ID NO: 306 - protein, 985 aa, Artificial Sequence
  AS148691-TCE-HLE
DIQMTQSPSSLSASVGDRVTITCRASQSVSSAVAWYQQKPGKAPKLLIYSASSLYSGVPSRFSGSRSGTDFTLTISSLQPEDFATYYCQQYYGAYLITFGQGTKVEIKGGGGSGGGGSGGGGSEVQLVESGGGLVQPGGSLRLSCAASGFNLYYSSIHWVRQAPGKGLEWVASIYSSYGSTSYADSVKGRFTISADTSKNTAYLQMNSLRAEDTAVYYCARVGPGYYGIDYWGQGTLVTVSSSGGGGSEVQLVESGGGLVQPGGSLKLSCAASGFTFNKYAMNWVRQAPGKGLEWVARIRSKYNNYATYYADSVKDRFTISRDDSKNTAYLQMNNLKTEDTAVYYCVRHGNFGNSYISYWAYWGQGTLVTVSSGGGGSGGGGSGGGGSQTVVTQEPSLTVSPGGTVTLTCGSSTGAVTSGNYPNWVQQKPGQAPRGLIGGTKFLAPGTPARFSGSLLGGKAALTLSGVQPEDEAEYYCVLWYSNRWVFGGGTKLTVLGGGGDKTHTCPPCPAPELLGGPSVFLFPPKPKDTLMISRTPEVTCVVVDVSHEDPEVKFNWYVDGVEVHNAKTKPCEEQYGSTYRCVSVLTVLHQDWLNGKEYKCKVSNKALPAPIEKTISKAKGQPREPQVYTLPPSREEMTKNQVSLTCLVKGFYPSDIAVEWESNGQPENNYKTTPPVLDSDGSFFLYSKLTVDKSRWQQGNVFSCSVMHEALHNHYTQKSLSLSPGKGGGGSGGGGSGGGGSGGGGSGGGGSGGGGSDKTHTCPPCPAPELLGGPSVFLFPPKPKDTLMISRTPEVTCVVVDVSHEDPEVKFNWYVDGVEVHNAKTKPCEEQYGSTYRCVSVLTVLHQDWLNGKEYKCKVSNKALPAPIEKTISKAKGQPREPQVYTLPPSREEMTKNQVSLTCLVKGFYPSDIAVEWESNGQPENNYKTTPPVLDSDGSFFLYSKLTVDKSRWQQGNVFSCSVMHEALHNHYTQKSLSLSPGK

SEQ ID NO: 307 - protein, 994 aa, Artificial Sequence
  AS170036 VL1VH1-VHG56Y-TCE-HLE
QSALTQPRSVSGSPGQSVTISCAGTSSDVGSENYVSWYQQHPGKAPKLMIYQVNKRASGVPDRFSGSKSGNTASLTISGLQAEDEADYYCASYRSSDHNIVFGGGTKLTVLGGGGSGGGGSGGGGSEVQLVESGGGLVQPGGSLRLSCAASGFTFSSYAMSWVRQAPGKGLEWVSTINSGTYSPYYADSVKGRFTISRDNSKNTLYLQMNSLRAEDTAVYYCAKNFFDGSWFLGPPAMDYWGQGTLVTVSSSGGGGSEVQLVESGGGLVQPGGSLKLSCAASGFTFNKYAMNWVRQAPGKGLEWVARIRSKYNNYATYYADSVKDRFTISRDDSKNTAYLQMNNLKTEDTAVYYCVRHGNFGNSYISYWAYWGQGTLVTVSSGGGGSGGGGSGGGGSQTVVTQEPSLTVSPGGTVTLTCGSSTGAVTSGNYPNWVQQKPGQAPRGLIGGTKFLAPGTPARFSGSLLGGKAALTLSGVQPEDEAEYYCVLWYSNRWVFGGGTKLTVLGGGGDKTHTCPPCPAPELLGGPSVFLFPPKPKDTLMISRTPEVTCVVVDVSHEDPEVKFNWYVDGVEVHNAKTKPCEEQYGSTYRCVSVLTVLHQDWLNGKEYKCKVSNKALPAPIEKTISKAKGQPREPQVYTLPPSREEMTKNQVSLTCLVKGFYPSDIAVEWESNGQPENNYKTTPPVLDSDGSFFLYSKLTVDKSRWQQGNVFSCSVMHEALHNHYTQKSLSLSPGKGGGGSGGGGSGGGGSGGGGSGGGGSGGGGSDKTHTCPPCPAPELLGGPSVFLFPPKPKDTLMISRTPEVTCVVVDVSHEDPEVKFNWYVDGVEVHNAKTKPCEEQYGSTYRCVSVLTVLHQDWLNGKEYKCKVSNKALPAPIEKTISKAKGQPREPQVYTLPPSREEMTKNQVSLTCLVKGFYPSDIAVEWESNGQPENNYKTTPPVLDSDGSFFLYSKLTVDKSRWQQGNVFSCSVMHEALHNHYTQKSLSLSPGK

SEQ ID NO: 308 - protein, 994 aa, Artificial Sequence
  AS170036 VL1VH1-VHS57K-TCE-HLE
QSALTQPRSVSGSPGQSVTISCAGTSSDVGSENYVSWYQQHPGKAPKLMIYQVNKRASGVPDRFSGSKSGNTASLTISGLQAEDEADYYCASYRSSDHNIVFGGGTKLTVLGGGGSGGGGSGGGGSEVQLVESGGGLVQPGGSLRLSCAASGFTFSSYAMSWVRQAPGKGLEWVSTINSGTGKPYYADSVKGRFTISRDNSKNTLYLQMNSLRAEDTAVYYCAKNFFDGSWFLGPPAMDYWGQGTLVTVSSSGGGGSEVQLVESGGGLVQPGGSLKLSCAASGFTFNKYAMNWVRQAPGKGLEWVARIRSKYNNYATYYADSVKDRFTISRDDSKNTAYLQMNNLKTEDTAVYYCVRHGNFGNSYISYWAYWGQGTLVTVSSGGGGSGGGGSGGGGSQTVVTQEPSLTVSPGGTVTLTCGSSTGAVTSGNYPNWVQQKPGQAPRGLIGGTKFLAPGTPARFSGSLLGGKAALTLSGVQPEDEAEYYCVLWYSNRWVFGGGTKLTVLGGGGDKTHTCPPCPAPELLGGPSVFLFPPKPKDTLMISRTPEVTCVVVDVSHEDPEVKFNWYVDGVEVHNAKTKPCEEQYGSTYRCVSVLTVLHQDWLNGKEYKCKVSNKALPAPIEKTISKAKGQPREPQVYTLPPSREEMTKNQVSLTCLVKGFYPSDIAVEWESNGQPENNYKTTPPVLDSDGSFFLYSKLTVDKSRWQQGNVFSCSVMHEALHNHYTQKSLSLSPGKGGGGSGGGGSGGGGSGGGGSGGGGSGGGGSDKTHTCPPCPAPELLGGPSVFLFPPKPKDTLMISRTPEVTCVVVDVSHEDPEVKFNWYVDGVEVHNAKTKPCEEQYGSTYRCVSVLTVLHQDWLNGKEYKCKVSNKALPAPIEKTISKAKGQPREPQVYTLPPSREEMTKNQVSLTCLVKGFYPSDIAVEWESNGQPENNYKTTPPVLDSDGSFFLYSKLTVDKSRWQQGNVFSCSVMHEALHNHYTQKSLSLSPGK

SEQ ID NO: 309 - protein, 994 aa, Artificial Sequence
  AS170036 VL1VH1-VHS57H-TCE-HLE
QSALTQPRSVSGSPGQSVTISCAGTSSDVGSENYVSWYQQHPGKAPKLMIYQVNKRASGVPDRFSGSKSGNTASLTISGLQAEDEADYYCASYRSSDHNIVFGGGTKLTVLGGGGSGGGGSGGGGSEVQLVESGGGLVQPGGSLRLSCAASGFTFSSYAMSWVRQAPGKGLEWVSTINSGTGHPYYADSVKGRFTISRDNSKNTLYLQMNSLRAEDTAVYYCAKNFFDGSWFLGPPAMDYWGQGTLVTVSSSGGGGSEVQLVESGGGLVQPGGSLKLSCAASGFTFNKYAMNWVRQAPGKGLEWVARIRSKYNNYATYYADSVKDRFTISRDDSKNTAYLQMNNLKTEDTAVYYCVRHGNFGNSYISYWAYWGQGTLVTVSSGGGGSGGGGSGGGGSQTVVTQEPSLTVSPGGTVTLTCGSSTGAVTSGNYPNWVQQKPGQAPRGLIGGTKFLAPGTPARFSGSLLGGKAALTLSGVQPEDEAEYYCVLWYSNRWVFGGGTKLTVLGGGGDKTHTCPPCPAPELLGGPSVFLFPPKPKDTLMISRTPEVTCVVVDVSHEDPEVKFNWYVDGVEVHNAKTKPCEEQYGSTYRCVSVLTVLHQDWLNGKEYKCKVSNKALPAPIEKTISKAKGQPREPQVYTLPPSREEMTKNQVSLTCLVKGFYPSDIAVEWESNGQPENNYKTTPPVLDSDGSFFLYSKLTVDKSRWQQGNVFSCSVMHEALHNHYTQKSLSLSPGKGGGGSGGGGSGGGGSGGGGSGGGGSGGGGSDKTHTCPPCPAPELLGGPSVFLFPPKPKDTLMISRTPEVTCVVVDVSHEDPEVKFNWYVDGVEVHNAKTKPCEEQYGSTYRCVSVLTVLHQDWLNGKEYKCKVSNKALPAPIEKTISKAKGQPREPQVYTLPPSREEMTKNQVSLTCLVKGFYPSDIAVEWESNGQPENNYKTTPPVLDSDGSFFLYSKLTVDKSRWQQGNVFSCSVMHEALHNHYTQKSLSLSPGK

SEQ ID NO: 310 - protein, 994 aa, Artificial Sequence
  AS170036 VL1VH1-VHG108D-TCE-HLE
QSALTQPRSVSGSPGQSVTISCAGTSSDVGSENYVSWYQQHPGKAPKLMIYQVNKRASGVPDRFSGSKSGNTASLTISGLQAEDEADYYCASYRSSDHNIVFGGGTKLTVLGGGGSGGGGSGGGGSEVQLVESGGGLVQPGGSLRLSCAASGFTFSSYAMSWVRQAPGKGLEWVSTINSGTGSPYYADSVKGRFTISRDNSKNTLYLQMNSLRAEDTAVYYCAKNFFDGSWFLDPPAMDYWGQGTLVTVSSSGGGGSEVQLVESGGGLVQPGGSLKLSCAASGFTFNKYAMNWVRQAPGKGLEWVARIRSKYNNYATYYADSVKDRFTISRDDSKNTAYLQMNNLKTEDTAVYYCVRHGNFGNSYISYWAYWGQGTLVTVSSGGGGSGGGGSGGGGSQTVVTQEPSLTVSPGGTVTLTCGSSTGAVTSGNYPNWVQQKPGQAPRGLIGGTKFLAPGTPARFSGSLLGGKAALTLSGVQPEDEAEYYCVLWYSNRWVFGGGTKLTVLGGGGDKTHTCPPCPAPELLGGPSVFLFPPKPKDTLMISRTPEVTCVVVDVSHEDPEVKFNWYVDGVEVHNAKTKPCEEQYGSTYRCVSVLTVLHQDWLNGKEYKCKVSNKALPAPIEKTISKAKGQPREPQVYTLPPSREEMTKNQVSLTCLVKGFYPSDIAVEWESNGQPENNYKTTPPVLDSDGSFFLYSKLTVDKSRWQQGNVFSCSVMHEALHNHYTQKSLSLSPGKGGGGSGGGGSGGGGSGGGGSGGGGSGGGGSDKTHTCPPCPAPELLGGPSVFLFPPKPKDTLMISRTPEVTCVVVDVSHEDPEVKFNWYVDGVEVHNAKTKPCEEQYGSTYRCVSVLTVLHQDWLNGKEYKCKVSNKALPAPIEKTISKAKGQPREPQVYTLPPSREEMTKNQVSLTCLVKGFYPSDIAVEWESNGQPENNYKTTPPVLDSDGSFFLYSKLTVDKSRWQQGNVFSCSVMHEALHNHYTQKSLSLSPGK

SEQ ID NO: 311 - protein, 994 aa, Artificial Sequence
  AS170036 VL1VH1-VHG108A-TCE-HLE
QSALTQPRSVSGSPGQSVTISCAGTSSDVGSENYVSWYQQHPGKAPKLMIYQVNKRASGVPDRFSGSKSGNTASLTISGLQAEDEADYYCASYRSSDHNIVFGGGTKLTVLGGGGSGGGGSGGGGSEVQLVESGGGLVQPGGSLRLSCAASGFTFSSYAMSWVRQAPGKGLEWVSTINSGTGSPYYADSVKGRFTISRDNSKNTLYLQMNSLRAEDTAVYYCAKNFFDGSWFLAPPAMDYWGQGTLVTVSSSGGGGSEVQLVESGGGLVQPGGSLKLSCAASGFTFNKYAMNWVRQAPGKGLEWVARIRSKYNNYATYYADSVKDRFTISRDDSKNTAYLQMNNLKTEDTAVYYCVRHGNFGNSYISYWAYWGQGTLVTVSSGGGGSGGGGSGGGGSQTVVTQEPSLTVSPGGTVTLTCGSSTGAVTSGNYPNWVQQKPGQAPRGLIGGTKFLAPGTPARFSGSLLGGKAALTLSGVQPEDEAEYYCVLWYSNRWVFGGGTKLTVLGGGGDKTHTCPPCPAPELLGGPSVFLFPPKPKDTLMISRTPEVTCVVVDVSHEDPEVKFNWYVDGVEVHNAKTKPCEEQYGSTYRCVSVLTVLHQDWLNGKEYKCKVSNKALPAPIEKTISKAKGQPREPQVYTLPPSREEMTKNQVSLTCLVKGFYPSDIAVEWESNGQPENNYKTTPPVLDSDGSFFLYSKLTVDKSRWQQGNVFSCSVMHEALHNHYTQKSLSLSPGKGGGGSGGGGSGGGGSGGGGSGGGGSGGGGSDKTHTCPPCPAPELLGGPSVFLFPPKPKDTLMISRTPEVTCVVVDVSHEDPEVKFNWYVDGVEVHNAKTKPCEEQYGSTYRCVSVLTVLHQDWLNGKEYKCKVSNKALPAPIEKTISKAKGQPREPQVYTLPPSREEMTKNQVSLTCLVKGFYPSDIAVEWESNGQPENNYKTTPPVLDSDGSFFLYSKLTVDKSRWQQGNVFSCSVMHEALHNHYTQKSLSLSPGK

SEQ ID NO: 312 - protein, 994 aa, Artificial Sequence
  AS170036 VL1VH1-56Y98Q-TCE-HLE
QSALTQPRSVSGSPGQSVTISCAGTSSDVGSENYVSWYQQHPGKAPKLMIYQVNKRASGVPDRFSGSKSGNTASLTISGLQAEDEADYYCASYRSSDQNIVFGGGTKLTVLGGGGSGGGGSGGGGSEVQLVESGGGLVQPGGSLRLSCAASGFTFSSYAMSWVRQAPGKGLEWVSTINSGTYSPYYADSVKGRFTISRDNSKNTLYLQMNSLRAEDTAVYYCAKNFFDGSWFLGPPAMDYWGQGTLVTVSSSGGGGSEVQLVESGGGLVQPGGSLKLSCAASGFTFNKYAMNWVRQAPGKGLEWVARIRSKYNNYATYYADSVKDRFTISRDDSKNTAYLQMNNLKTEDTAVYYCVRHGNFGNSYISYWAYWGQGTLVTVSSGGGGSGGGGSGGGGSQTVVTQEPSLTVSPGGTVTLTCGSSTGAVTSGNYPNWVQQKPGQAPRGLIGGTKFLAPGTPARFSGSLLGGKAALTLSGVQPEDEAEYYCVLWYSNRWVFGGGTKLTVLGGGGDKTHTCPPCPAPELLGGPSVFLFPPKPKDTLMISRTPEVTCVVVDVSHEDPEVKFNWYVDGVEVHNAKTKPCEEQYGSTYRCVSVLTVLHQDWLNGKEYKCKVSNKALPAPIEKTISKAKGQPREPQVYTLPPSREEMTKNQVSLTCLVKGFYPSDIAVEWESNGQPENNYKTTPPVLDSDGSFFLYSKLTVDKSRWQQGNVFSCSVMHEALHNHYTQKSLSLSPGKGGGGSGGGGSGGGGSGGGGSGGGGSGGGGSDKTHTCPPCPAPELLGGPSVFLFPPKPKDTLMISRTPEVTCVVVDVSHEDPEVKFNWYVDGVEVHNAKTKPCEEQYGSTYRCVSVLTVLHQDWLNGKEYKCKVSNKALPAPIEKTISKAKGQPREPQVYTLPPSREEMTKNQVSLTCLVKGFYPSDIAVEWESNGQPENNYKTTPPVLDSDGSFFLYSKLTVDKSRWQQGNVFSCSVMHEALHNHYTQKSLSLSPGK

SEQ ID NO: 313 - protein, 994 aa, Artificial Sequence
  AS170036 VL1VH1-56N98I-TCE-HLE
QSALTQPRSVSGSPGQSVTISCAGTSSDVGSENYVSWYQQHPGKAPKLMIYQVNKRASGVPDRFSGSKSGNTASLTISGLQAEDEADYYCASYRSSDINIVFGGGTKLTVLGGGGSGGGGSGGGGSEVQLVESGGGLVQPGGSLRLSCAASGFTFSSYAMSWVRQAPGKGLEWVSTINSGTNSPYYADSVKGRFTISRDNSKNTLYLQMNSLRAEDTAVYYCAKNFFDGSWFLGPPAMDYWGQGTLVTVSSSGGGGSEVQLVESGGGLVQPGGSLKLSCAASGFTFNKYAMNWVRQAPGKGLEWVARIRSKYNNYATYYADSVKDRFTISRDDSKNTAYLQMNNLKTEDTAVYYCVRHGNFGNSYISYWAYWGQGTLVTVSSGGGGSGGGGSGGGGSQTVVTQEPSLTVSPGGTVTLTCGSSTGAVTSGNYPNWVQQKPGQAPRGLIGGTKFLAPGTPARFSGSLLGGKAALTLSGVQPEDEAEYYCVLWYSNRWVFGGGTKLTVLGGGGDKTHTCPPCPAPELLGGPSVFLFPPKPKDTLMISRTPEVTCVVVDVSHEDPEVKFNWYVDGVEVHNAKTKPCEEQYGSTYRCVSVLTVLHQDWLNGKEYKCKVSNKALPAPIEKTISKAKGQPREPQVYTLPPSREEMTKNQVSLTCLVKGFYPSDIAVEWESNGQPENNYKTTPPVLDSDGSFFLYSKLTVDKSRWQQGNVFSCSVMHEALHNHYTQKSLSLSPGKGGGGSGGGGSGGGGSGGGGSGGGGSGGGGSDKTHTCPPCPAPELLGGPSVFLFPPKPKDTLMISRTPEVTCVVVDVSHEDPEVKFNWYVDGVEVHNAKTKPCEEQYGSTYRCVSVLTVLHQDWLNGKEYKCKVSNKALPAPIEKTISKAKGQPREPQVYTLPPSREEMTKNQVSLTCLVKGFYPSDIAVEWESNGQPENNYKTTPPVLDSDGSFFLYSKLTVDKSRWQQGNVFSCSVMHEALHNHYTQKSLSLSPGK

SEQ ID NO: 314 - protein, 994 aa, Artificial Sequence
  AS170036 VL1VH1-57K98F-TCE-HLE
QSALTQPRSVSGSPGQSVTISCAGTSSDVGSENYVSWYQQHPGKAPKLMIYQVNKRASGVPDRFSGSKSGNTASLTISGLQAEDEADYYCASYRSSDFNIVFGGGTKLTVLGGGGSGGGGSGGGGSEVQLVESGGGLVQPGGSLRLSCAASGFTFSSYAMSWVRQAPGKGLEWVSTINSGTGKPYYADSVKGRFTISRDNSKNTLYLQMNSLRAEDTAVYYCAKNFFDGSWFLGPPAMDYWGQGTLVTVSSSGGGGSEVQLVESGGGLVQPGGSLKLSCAASGFTFNKYAMNWVRQAPGKGLEWVARIRSKYNNYATYYADSVKDRFTISRDDSKNTAYLQMNNLKTEDTAVYYCVRHGNFGNSYISYWAYWGQGTLVTVSSGGGGSGGGGSGGGGSQTVVTQEPSLTVSPGGTVTLTCGSSTGAVTSGNYPNWVQQKPGQAPRGLIGGTKFLAPGTPARFSGSLLGGKAALTLSGVQPEDEAEYYCVLWYSNRWVFGGGTKLTVLGGGGDKTHTCPPCPAPELLGGPSVFLFPPKPKDTLMISRTPEVTCVVVDVSHEDPEVKFNWYVDGVEVHNAKTKPCEEQYGSTYRCVSVLTVLHQDWLNGKEYKCKVSNKALPAPIEKTISKAKGQPREPQVYTLPPSREEMTKNQVSLTCLVKGFYPSDIAVEWESNGQPENNYKTTPPVLDSDGSFFLYSKLTVDKSRWQQGNVFSCSVMHEALHNHYTQKSLSLSPGKGGGGSGGGGSGGGGSGGGGSGGGGSGGGGSDKTHTCPPCPAPELLGGPSVFLFPPKPKDTLMISRTPEVTCVVVDVSHEDPEVKFNWYVDGVEVHNAKTKPCEEQYGSTYRCVSVLTVLHQDWLNGKEYKCKVSNKALPAPIEKTISKAKGQPREPQVYTLPPSREEMTKNQVSLTCLVKGFYPSDIAVEWESNGQPENNYKTTPPVLDSDGSFFLYSKLTVDKSRWQQGNVFSCSVMHEALHNHYTQKSLSLSPGK

SEQ ID NO: 315 - protein, 994 aa, Artificial Sequence
  AS170036 VL1VH1-57M98Q-TCE-HLE
QSALTQPRSVSGSPGQSVTISCAGTSSDVGSENYVSWYQQHPGKAPKLMIYQVNKRASGVPDRFSGSKSGNTASLTISGLQAEDEADYYCASYRSSDQNIVFGGGTKLTVLGGGGSGGGGSGGGGSEVQLVESGGGLVQPGGSLRLSCAASGFTFSSYAMSWVRQAPGKGLEWVSTINSGTGMPYYADSVKGRFTISRDNSKNTLYLQMNSLRAEDTAVYYCAKNFFDGSWFLGPPAMDYWGQGTLVTVSSSGGGGSEVQLVESGGGLVQPGGSLKLSCAASGFTFNKYAMNWVRQAPGKGLEWVARIRSKYNNYATYYADSVKDRFTISRDDSKNTAYLQMNNLKTEDTAVYYCVRHGNFGNSYISYWAYWGQGTLVTVSSGGGGSGGGGSGGGGSQTVVTQEPSLTVSPGGTVTLTCGSSTGAVTSGNYPNWVQQKPGQAPRGLIGGTKFLAPGTPARFSGSLLGGKAALTLSGVQPEDEAEYYCVLWYSNRWVFGGGTKLTVLGGGGDKTHTCPPCPAPELLGGPSVFLFPPKPKDTLMISRTPEVTCVVVDVSHEDPEVKFNWYVDGVEVHNAKTKPCEEQYGSTYRCVSVLTVLHQDWLNGKEYKCKVSNKALPAPIEKTISKAKGQPREPQVYTLPPSREEMTKNQVSLTCLVKGFYPSDIAVEWESNGQPENNYKTTPPVLDSDGSFFLYSKLTVDKSRWQQGNVFSCSVMHEALHNHYTQKSLSLSPGKGGGGSGGGGSGGGGSGGGGSGGGGSGGGGSDKTHTCPPCPAPELLGGPSVFLFPPKPKDTLMISRTPEVTCVVVDVSHEDPEVKFNWYVDGVEVHNAKTKPCEEQYGSTYRCVSVLTVLHQDWLNGKEYKCKVSNKALPAPIEKTISKAKGQPREPQVYTLPPSREEMTKNQVSLTCLVKGFYPSDIAVEWESNGQPENNYKTTPPVLDSDGSFFLYSKLTVDKSRWQQGNVFSCSVMHEALHNHYTQKSLSLSPGK

SEQ ID NO: 316 - protein, 994 aa, Artificial Sequence
  AS170036 VL1VH1-56Y108A-TCE-HLE
QSALTQPRSVSGSPGQSVTISCAGTSSDVGSENYVSWYQQHPGKAPKLMIYQVNKRASGVPDRFSGSKSGNTASLTISGLQAEDEADYYCASYRSSDHNIVFGGGTKLTVLGGGGSGGGGSGGGGSEVQLVESGGGLVQPGGSLRLSCAASGFTFSSYAMSWVRQAPGKGLEWVSTINSGTYSPYYADSVKGRFTISRDNSKNTLYLQMNSLRAEDTAVYYCAKNFFDGSWFLAPPAMDYWGQGTLVTVSSSGGGGSEVQLVESGGGLVQPGGSLKLSCAASGFTFNKYAMNWVRQAPGKGLEWVARIRSKYNNYATYYADSVKDRFTISRDDSKNTAYLQMNNLKTEDTAVYYCVRHGNFGNSYISYWAYWGQGTLVTVSSGGGGSGGGGSGGGGSQTVVTQEPSLTVSPGGTVTLTCGSSTGAVTSGNYPNWVQQKPGQAPRGLIGGTKFLAPGTPARFSGSLLGGKAALTLSGVQPEDEAEYYCVLWYSNRWVFGGGTKLTVLGGGGDKTHTCPPCPAPELLGGPSVFLFPPKPKDTLMISRTPEVTCVVVDVSHEDPEVKFNWYVDGVEVHNAKTKPCEEQYGSTYRCVSVLTVLHQDWLNGKEYKCKVSNKALPAPIEKTISKAKGQPREPQVYTLPPSREEMTKNQVSLTCLVKGFYPSDIAVEWESNGQPENNYKTTPPVLDSDGSFFLYSKLTVDKSRWQQGNVFSCSVMHEALHNHYTQKSLSLSPGKGGGGSGGGGSGGGGSGGGGSGGGGSGGGGSDKTHTCPPCPAPELLGGPSVFLFPPKPKDTLMISRTPEVTCVVVDVSHEDPEVKFNWYVDGVEVHNAKTKPCEEQYGSTYRCVSVLTVLHQDWLNGKEYKCKVSNKALPAPIEKTISKAKGQPREPQVYTLPPSREEMTKNQVSLTCLVKGFYPSDIAVEWESNGQPENNYKTTPPVLDSDGSFFLYSKLTVDKSRWQQGNVFSCSVMHEALHNHYTQKSLSLSPGK

SEQ ID NO: 317 - protein, 994 aa, Artificial Sequence
  AS170036 VL1VH1-56N108A-TCE-HLE
QSALTQPRSVSGSPGQSVTISCAGTSSDVGSENYVSWYQQHPGKAPKLMIYQVNKRASGVPDRFSGSKSGNTASLTISGLQAEDEADYYCASYRSSDHNIVFGGGTKLTVLGGGGSGGGGSGGGGSEVQLVESGGGLVQPGGSLRLSCAASGFTFSSYAMSWVRQAPGKGLEWVSTINSGTNSPYYADSVKGRFTISRDNSKNTLYLQMNSLRAEDTAVYYCAKNFFDGSWFLAPPAMDYWGQGTLVTVSSSGGGGSEVQLVESGGGLVQPGGSLKLSCAASGFTFNKYAMNWVRQAPGKGLEWVARIRSKYNNYATYYADSVKDRFTISRDDSKNTAYLQMNNLKTEDTAVYYCVRHGNFGNSYISYWAYWGQGTLVTVSSGGGGSGGGGSGGGGSQTVVTQEPSLTVSPGGTVTLTCGSSTGAVTSGNYPNWVQQKPGQAPRGLIGGTKFLAPGTPARFSGSLLGGKAALTLSGVQPEDEAEYYCVLWYSNRWVFGGGTKLTVLGGGGDKTHTCPPCPAPELLGGPSVFLFPPKPKDTLMISRTPEVTCVVVDVSHEDPEVKFNWYVDGVEVHNAKTKPCEEQYGSTYRCVSVLTVLHQDWLNGKEYKCKVSNKALPAPIEKTISKAKGQPREPQVYTLPPSREEMTKNQVSLTCLVKGFYPSDIAVEWESNGQPENNYKTTPPVLDSDGSFFLYSKLTVDKSRWQQGNVFSCSVMHEALHNHYTQKSLSLSPGKGGGGSGGGGSGGGGSGGGGSGGGGSGGGGSDKTHTCPPCPAPELLGGPSVFLFPPKPKDTLMISRTPEVTCVVVDVSHEDPEVKFNWYVDGVEVHNAKTKPCEEQYGSTYRCVSVLTVLHQDWLNGKEYKCKVSNKALPAPIEKTISKAKGQPREPQVYTLPPSREEMTKNQVSLTCLVKGFYPSDIAVEWESNGQPENNYKTTPPVLDSDGSFFLYSKLTVDKSRWQQGNVFSCSVMHEALHNHYTQKSLSLSPGK

SEQ ID NO: 318 - protein, 994 aa, Artificial Sequence
  AS170036 VL1VH1-57H108A-TCE-HLE
QSALTQPRSVSGSPGQSVTISCAGTSSDVGSENYVSWYQQHPGKAPKLMIYQVNKRASGVPDRFSGSKSGNTASLTISGLQAEDEADYYCASYRSSDHNIVFGGGTKLTVLGGGGSGGGGSGGGGSEVQLVESGGGLVQPGGSLRLSCAASGFTFSSYAMSWVRQAPGKGLEWVSTINSGTGHPYYADSVKGRFTISRDNSKNTLYLQMNSLRAEDTAVYYCAKNFFDGSWFLAPPAMDYWGQGTLVTVSSSGGGGSEVQLVESGGGLVQPGGSLKLSCAASGFTFNKYAMNWVRQAPGKGLEWVARIRSKYNNYATYYADSVKDRFTISRDDSKNTAYLQMNNLKTEDTAVYYCVRHGNFGNSYISYWAYWGQGTLVTVSSGGGGSGGGGSGGGGSQTVVTQEPSLTVSPGGTVTLTCGSSTGAVTSGNYPNWVQQKPGQAPRGLIGGTKFLAPGTPARFSGSLLGGKAALTLSGVQPEDEAEYYCVLWYSNRWVFGGGTKLTVLGGGGDKTHTCPPCPAPELLGGPSVFLFPPKPKDTLMISRTPEVTCVVVDVSHEDPEVKFNWYVDGVEVHNAKTKPCEEQYGSTYRCVSVLTVLHQDWLNGKEYKCKVSNKALPAPIEKTISKAKGQPREPQVYTLPPSREEMTKNQVSLTCLVKGFYPSDIAVEWESNGQPENNYKTTPPVLDSDGSFFLYSKLTVDKSRWQQGNVFSCSVMHEALHNHYTQKSLSLSPGKGGGGSGGGGSGGGGSGGGGSGGGGSGGGGSDKTHTCPPCPAPELLGGPSVFLFPPKPKDTLMISRTPEVTCVVVDVSHEDPEVKFNWYVDGVEVHNAKTKPCEEQYGSTYRCVSVLTVLHQDWLNGKEYKCKVSNKALPAPIEKTISKAKGQPREPQVYTLPPSREEMTKNQVSLTCLVKGFYPSDIAVEWESNGQPENNYKTTPPVLDSDGSFFLYSKLTVDKSRWQQGNVFSCSVMHEALHNHYTQKSLSLSPGK

SEQ ID NO: 319 - protein, 994 aa, Artificial Sequence
  AS170036 VL1VH1-57K108A-TCE-HLE
QSALTQPRSVSGSPGQSVTISCAGTSSDVGSENYVSWYQQHPGKAPKLMIYQVNKRASGVPDRFSGSKSGNTASLTISGLQAEDEADYYCASYRSSDHNIVFGGGTKLTVLGGGGSGGGGSGGGGSEVQLVESGGGLVQPGGSLRLSCAASGFTFSSYAMSWVRQAPGKGLEWVSTINSGTGKPYYADSVKGRFTISRDNSKNTLYLQMNSLRAEDTAVYYCAKNFFDGSWFLAPPAMDYWGQGTLVTVSSSGGGGSEVQLVESGGGLVQPGGSLKLSCAASGFTFNKYAMNWVRQAPGKGLEWVARIRSKYNNYATYYADSVKDRFTISRDDSKNTAYLQMNNLKTEDTAVYYCVRHGNFGNSYISYWAYWGQGTLVTVSSGGGGSGGGGSGGGGSQTVVTQEPSLTVSPGGTVTLTCGSSTGAVTSGNYPNWVQQKPGQAPRGLIGGTKFLAPGTPARFSGSLLGGKAALTLSGVQPEDEAEYYCVLWYSNRWVFGGGTKLTVLGGGGDKTHTCPPCPAPELLGGPSVFLFPPKPKDTLMISRTPEVTCVVVDVSHEDPEVKFNWYVDGVEVHNAKTKPCEEQYGSTYRCVSVLTVLHQDWLNGKEYKCKVSNKALPAPIEKTISKAKGQPREPQVYTLPPSREEMTKNQVSLTCLVKGFYPSDIAVEWESNGQPENNYKTTPPVLDSDGSFFLYSKLTVDKSRWQQGNVFSCSVMHEALHNHYTQKSLSLSPGKGGGGSGGGGSGGGGSGGGGSGGGGSGGGGSDKTHTCPPCPAPELLGGPSVFLFPPKPKDTLMISRTPEVTCVVVDVSHEDPEVKFNWYVDGVEVHNAKTKPCEEQYGSTYRCVSVLTVLHQDWLNGKEYKCKVSNKALPAPIEKTISKAKGQPREPQVYTLPPSREEMTKNQVSLTCLVKGFYPSDIAVEWESNGQPENNYKTTPPVLDSDGSFFLYSKLTVDKSRWQQGNVFSCSVMHEALHNHYTQKSLSLSPGK

SEQ ID NO: 320 - protein, 994 aa, Artificial Sequence
  AS170036 VL1VH1-57K108S-TCE-HLE
QSALTQPRSVSGSPGQSVTISCAGTSSDVGSENYVSWYQQHPGKAPKLMIYQVNKRASGVPDRFSGSKSGNTASLTISGLQAEDEADYYCASYRSSDHNIVFGGGTKLTVLGGGGSGGGGSGGGGSEVQLVESGGGLVQPGGSLRLSCAASGFTFSSYAMSWVRQAPGKGLEWVSTINSGTGKPYYADSVKGRFTISRDNSKNTLYLQMNSLRAEDTAVYYCAKNFFDGSWFLSPPAMDYWGQGTLVTVSSSGGGGSEVQLVESGGGLVQPGGSLKLSCAASGFTFNKYAMNWVRQAPGKGLEWVARIRSKYNNYATYYADSVKDRFTISRDDSKNTAYLQMNNLKTEDTAVYYCVRHGNFGNSYISYWAYWGQGTLVTVSSGGGGSGGGGSGGGGSQTVVTQEPSLTVSPGGTVTLTCGSSTGAVTSGNYPNWVQQKPGQAPRGLIGGTKFLAPGTPARFSGSLLGGKAALTLSGVQPEDEAEYYCVLWYSNRWVFGGGTKLTVLGGGGDKTHTCPPCPAPELLGGPSVFLFPPKPKDTLMISRTPEVTCVVVDVSHEDPEVKFNWYVDGVEVHNAKTKPCEEQYGSTYRCVSVLTVLHQDWLNGKEYKCKVSNKALPAPIEKTISKAKGQPREPQVYTLPPSREEMTKNQVSLTCLVKGFYPSDIAVEWESNGQPENNYKTTPPVLDSDGSFFLYSKLTVDKSRWQQGNVFSCSVMHEALHNHYTQKSLSLSPGKGGGGSGGGGSGGGGSGGGGSGGGGSGGGGSDKTHTCPPCPAPELLGGPSVFLFPPKPKDTLMISRTPEVTCVVVDVSHEDPEVKFNWYVDGVEVHNAKTKPCEEQYGSTYRCVSVLTVLHQDWLNGKEYKCKVSNKALPAPIEKTISKAKGQPREPQVYTLPPSREEMTKNQVSLTCLVKGFYPSDIAVEWESNGQPENNYKTTPPVLDSDGSFFLYSKLTVDKSRWQQGNVFSCSVMHEALHNHYTQKSLSLSPGK

SEQ ID NO: 321 - protein, 994 aa, Artificial Sequence
  AS170036 VL1VH1-98I108A-TCE-HLE
QSALTQPRSVSGSPGQSVTISCAGTSSDVGSENYVSWYQQHPGKAPKLMIYQVNKRASGVPDRFSGSKSGNTASLTISGLQAEDEADYYCASYRSSDINIVFGGGTKLTVLGGGGSGGGGSGGGGSEVQLVESGGGLVQPGGSLRLSCAASGFTFSSYAMSWVRQAPGKGLEWVSTINSGTGSPYYADSVKGRFTISRDNSKNTLYLQMNSLRAEDTAVYYCAKNFFDGSWFLAPPAMDYWGQGTLVTVSSSGGGGSEVQLVESGGGLVQPGGSLKLSCAASGFTFNKYAMNWVRQAPGKGLEWVARIRSKYNNYATYYADSVKDRFTISRDDSKNTAYLQMNNLKTEDTAVYYCVRHGNFGNSYISYWAYWGQGTLVTVSSGGGGSGGGGSGGGGSQTVVTQEPSLTVSPGGTVTLTCGSSTGAVTSGNYPNWVQQKPGQAPRGLIGGTKFLAPGTPARFSGSLLGGKAALTLSGVQPEDEAEYYCVLWYSNRWVFGGGTKLTVLGGGGDKTHTCPPCPAPELLGGPSVFLFPPKPKDTLMISRTPEVTCVVVDVSHEDPEVKFNWYVDGVEVHNAKTKPCEEQYGSTYRCVSVLTVLHQDWLNGKEYKCKVSNKALPAPIEKTISKAKGQPREPQVYTLPPSREEMTKNQVSLTCLVKGFYPSDIAVEWESNGQPENNYKTTPPVLDSDGSFFLYSKLTVDKSRWQQGNVFSCSVMHEALHNHYTQKSLSLSPGKGGGGSGGGGSGGGGSGGGGSGGGGSGGGGSDKTHTCPPCPAPELLGGPSVFLFPPKPKDTLMISRTPEVTCVVVDVSHEDPEVKFNWYVDGVEVHNAKTKPCEEQYGSTYRCVSVLTVLHQDWLNGKEYKCKVSNKALPAPIEKTISKAKGQPREPQVYTLPPSREEMTKNQVSLTCLVKGFYPSDIAVEWESNGQPENNYKTTPPVLDSDGSFFLYSKLTVDKSRWQQGNVFSCSVMHEALHNHYTQKSLSLSPGK

SEQ ID NO: 322 - protein, 994 aa, Artificial Sequence
  AS170036 VL1VH1-56Y98F108A-TCE-HLE
QSALTQPRSVSGSPGQSVTISCAGTSSDVGSENYVSWYQQHPGKAPKLMIYQVNKRASGVPDRFSGSKSGNTASLTISGLQAEDEADYYCASYRSSDFNIVFGGGTKLTVLGGGGSGGGGSGGGGSEVQLVESGGGLVQPGGSLRLSCAASGFTFSSYAMSWVRQAPGKGLEWVSTINSGTYSPYYADSVKGRFTISRDNSKNTLYLQMNSLRAEDTAVYYCAKNFFDGSWFLAPPAMDYWGQGTLVTVSSSGGGGSEVQLVESGGGLVQPGGSLKLSCAASGFTFNKYAMNWVRQAPGKGLEWVARIRSKYNNYATYYADSVKDRFTISRDDSKNTAYLQMNNLKTEDTAVYYCVRHGNFGNSYISYWAYWGQGTLVTVSSGGGGSGGGGSGGGGSQTVVTQEPSLTVSPGGTVTLTCGSSTGAVTSGNYPNWVQQKPGQAPRGLIGGTKFLAPGTPARFSGSLLGGKAALTLSGVQPEDEAEYYCVLWYSNRWVFGGGTKLTVLGGGGDKTHTCPPCPAPELLGGPSVFLFPPKPKDTLMISRTPEVTCVVVDVSHEDPEVKFNWYVDGVEVHNAKTKPCEEQYGSTYRCVSVLTVLHQDWLNGKEYKCKVSNKALPAPIEKTISKAKGQPREPQVYTLPPSREEMTKNQVSLTCLVKGFYPSDIAVEWESNGQPENNYKTTPPVLDSDGSFFLYSKLTVDKSRWQQGNVFSCSVMHEALHNHYTQKSLSLSPGKGGGGSGGGGSGGGGSGGGGSGGGGSGGGGSDKTHTCPPCPAPELLGGPSVFLFPPKPKDTLMISRTPEVTCVVVDVSHEDPEVKFNWYVDGVEVHNAKTKPCEEQYGSTYRCVSVLTVLHQDWLNGKEYKCKVSNKALPAPIEKTISKAKGQPREPQVYTLPPSREEMTKNQVSLTCLVKGFYPSDIAVEWESNGQPENNYKTTPPVLDSDGSFFLYSKLTVDKSRWQQGNVFSCSVMHEALHNHYTQKSLSLSPGK

SEQ ID NO: 323 - protein, 994 aa, Artificial Sequence
  AS170036 VL1VH1-56Y98F108S-TCE-HLE
QSALTQPRSVSGSPGQSVTISCAGTSSDVGSENYVSWYQQHPGKAPKLMIYQVNKRASGVPDRFSGSKSGNTASLTISGLQAEDEADYYCASYRSSDFNIVFGGGTKLTVLGGGGSGGGGSGGGGSEVQLVESGGGLVQPGGSLRLSCAASGFTFSSYAMSWVRQAPGKGLEWVSTINSGTYSPYYADSVKGRFTISRDNSKNTLYLQMNSLRAEDTAVYYCAKNFFDGSWFLSPPAMDYWGQGTLVTVSSSGGGGSEVQLVESGGGLVQPGGSLKLSCAASGFTFNKYAMNWVRQAPGKGLEWVARIRSKYNNYATYYADSVKDRFTISRDDSKNTAYLQMNNLKTEDTAVYYCVRHGNFGNSYISYWAYWGQGTLVTVSSGGGGSGGGGSGGGGSQTVVTQEPSLTVSPGGTVTLTCGSSTGAVTSGNYPNWVQQKPGQAPRGLIGGTKFLAPGTPARFSGSLLGGKAALTLSGVQPEDEAEYYCVLWYSNRWVFGGGTKLTVLGGGGDKTHTCPPCPAPELLGGPSVFLFPPKPKDTLMISRTPEVTCVVVDVSHEDPEVKFNWYVDGVEVHNAKTKPCEEQYGSTYRCVSVLTVLHQDWLNGKEYKCKVSNKALPAPIEKTISKAKGQPREPQVYTLPPSREEMTKNQVSLTCLVKGFYPSDIAVEWESNGQPENNYKTTPPVLDSDGSFFLYSKLTVDKSRWQQGNVFSCSVMHEALHNHYTQKSLSLSPGKGGGGSGGGGSGGGGSGGGGSGGGGSGGGGSDKTHTCPPCPAPELLGGPSVFLFPPKPKDTLMISRTPEVTCVVVDVSHEDPEVKFNWYVDGVEVHNAKTKPCEEQYGSTYRCVSVLTVLHQDWLNGKEYKCKVSNKALPAPIEKTISKAKGQPREPQVYTLPPSREEMTKNQVSLTCLVKGFYPSDIAVEWESNGQPENNYKTTPPVLDSDGSFFLYSKLTVDKSRWQQGNVFSCSVMHEALHNHYTQKSLSLSPGK

SEQ ID NO: 324 - protein, 994 aa, Artificial Sequence
  AS170036 VL1VH1-56Y98I108A-TCE-HLE
QSALTQPRSVSGSPGQSVTISCAGTSSDVGSENYVSWYQQHPGKAPKLMIYQVNKRASGVPDRFSGSKSGNTASLTISGLQAEDEADYYCASYRSSDINIVFGGGTKLTVLGGGGSGGGGSGGGGSEVQLVESGGGLVQPGGSLRLSCAASGFTFSSYAMSWVRQAPGKGLEWVSTINSGTYSPYYADSVKGRFTISRDNSKNTLYLQMNSLRAEDTAVYYCAKNFFDGSWFLAPPAMDYWGQGTLVTVSSSGGGGSEVQLVESGGGLVQPGGSLKLSCAASGFTFNKYAMNWVRQAPGKGLEWVARIRSKYNNYATYYADSVKDRFTISRDDSKNTAYLQMNNLKTEDTAVYYCVRHGNFGNSYISYWAYWGQGTLVTVSSGGGGSGGGGSGGGGSQTVVTQEPSLTVSPGGTVTLTCGSSTGAVTSGNYPNWVQQKPGQAPRGLIGGTKFLAPGTPARFSGSLLGGKAALTLSGVQPEDEAEYYCVLWYSNRWVFGGGTKLTVLGGGGDKTHTCPPCPAPELLGGPSVFLFPPKPKDTLMISRTPEVTCVVVDVSHEDPEVKFNWYVDGVEVHNAKTKPCEEQYGSTYRCVSVLTVLHQDWLNGKEYKCKVSNKALPAPIEKTISKAKGQPREPQVYTLPPSREEMTKNQVSLTCLVKGFYPSDIAVEWESNGQPENNYKTTPPVLDSDGSFFLYSKLTVDKSRWQQGNVFSCSVMHEALHNHYTQKSLSLSPGKGGGGSGGGGSGGGGSGGGGSGGGGSGGGGSDKTHTCPPCPAPELLGGPSVFLFPPKPKDTLMISRTPEVTCVVVDVSHEDPEVKFNWYVDGVEVHNAKTKPCEEQYGSTYRCVSVLTVLHQDWLNGKEYKCKVSNKALPAPIEKTISKAKGQPREPQVYTLPPSREEMTKNQVSLTCLVKGFYPSDIAVEWESNGQPENNYKTTPPVLDSDGSFFLYSKLTVDKSRWQQGNVFSCSVMHEALHNHYTQKSLSLSPGK

SEQ ID NO: 325 - protein, 994 aa, Artificial Sequence
  AS170036 VL1VH1-56Y98I108S-TCE-HLE
QSALTQPRSVSGSPGQSVTISCAGTSSDVGSENYVSWYQQHPGKAPKLMIYQVNKRASGVPDRFSGSKSGNTASLTISGLQAEDEADYYCASYRSSDINIVFGGGTKLTVLGGGGSGGGGSGGGGSEVQLVESGGGLVQPGGSLRLSCAASGFTFSSYAMSWVRQAPGKGLEWVSTINSGTYSPYYADSVKGRFTISRDNSKNTLYLQMNSLRAEDTAVYYCAKNFFDGSWFLSPPAMDYWGQGTLVTVSSSGGGGSEVQLVESGGGLVQPGGSLKLSCAASGFTFNKYAMNWVRQAPGKGLEWVARIRSKYNNYATYYADSVKDRFTISRDDSKNTAYLQMNNLKTEDTAVYYCVRHGNFGNSYISYWAYWGQGTLVTVSSGGGGSGGGGSGGGGSQTVVTQEPSLTVSPGGTVTLTCGSSTGAVTSGNYPNWVQQKPGQAPRGLIGGTKFLAPGTPARFSGSLLGGKAALTLSGVQPEDEAEYYCVLWYSNRWVFGGGTKLTVLGGGGDKTHTCPPCPAPELLGGPSVFLFPPKPKDTLMISRTPEVTCVVVDVSHEDPEVKFNWYVDGVEVHNAKTKPCEEQYGSTYRCVSVLTVLHQDWLNGKEYKCKVSNKALPAPIEKTISKAKGQPREPQVYTLPPSREEMTKNQVSLTCLVKGFYPSDIAVEWESNGQPENNYKTTPPVLDSDGSFFLYSKLTVDKSRWQQGNVFSCSVMHEALHNHYTQKSLSLSPGKGGGGSGGGGSGGGGSGGGGSGGGGSGGGGSDKTHTCPPCPAPELLGGPSVFLFPPKPKDTLMISRTPEVTCVVVDVSHEDPEVKFNWYVDGVEVHNAKTKPCEEQYGSTYRCVSVLTVLHQDWLNGKEYKCKVSNKALPAPIEKTISKAKGQPREPQVYTLPPSREEMTKNQVSLTCLVKGFYPSDIAVEWESNGQPENNYKTTPPVLDSDGSFFLYSKLTVDKSRWQQGNVFSCSVMHEALHNHYTQKSLSLSPGK

SEQ ID NO: 326 - protein, 994 aa, Artificial Sequence
  AS170036 VL1VH1-56Y98Q108S-TCE-HLE
QSALTQPRSVSGSPGQSVTISCAGTSSDVGSENYVSWYQQHPGKAPKLMIYQVNKRASGVPDRFSGSKSGNTASLTISGLQAEDEADYYCASYRSSDQNIVFGGGTKLTVLGGGGSGGGGSGGGGSEVQLVESGGGLVQPGGSLRLSCAASGFTFSSYAMSWVRQAPGKGLEWVSTINSGTYSPYYADSVKGRFTISRDNSKNTLYLQMNSLRAEDTAVYYCAKNFFDGSWFLSPPAMDYWGQGTLVTVSSSGGGGSEVQLVESGGGLVQPGGSLKLSCAASGFTFNKYAMNWVRQAPGKGLEWVARIRSKYNNYATYYADSVKDRFTISRDDSKNTAYLQMNNLKTEDTAVYYCVRHGNFGNSYISYWAYWGQGTLVTVSSGGGGSGGGGSGGGGSQTVVTQEPSLTVSPGGTVTLTCGSSTGAVTSGNYPNWVQQKPGQAPRGLIGGTKFLAPGTPARFSGSLLGGKAALTLSGVQPEDEAEYYCVLWYSNRWVFGGGTKLTVLGGGGDKTHTCPPCPAPELLGGPSVFLFPPKPKDTLMISRTPEVTCVVVDVSHEDPEVKFNWYVDGVEVHNAKTKPCEEQYGSTYRCVSVLTVLHQDWLNGKEYKCKVSNKALPAPIEKTISKAKGQPREPQVYTLPPSREEMTKNQVSLTCLVKGFYPSDIAVEWESNGQPENNYKTTPPVLDSDGSFFLYSKLTVDKSRWQQGNVFSCSVMHEALHNHYTQKSLSLSPGKGGGGSGGGGSGGGGSGGGGSGGGGSGGGGSDKTHTCPPCPAPELLGGPSVFLFPPKPKDTLMISRTPEVTCVVVDVSHEDPEVKFNWYVDGVEVHNAKTKPCEEQYGSTYRCVSVLTVLHQDWLNGKEYKCKVSNKALPAPIEKTISKAKGQPREPQVYTLPPSREEMTKNQVSLTCLVKGFYPSDIAVEWESNGQPENNYKTTPPVLDSDGSFFLYSKLTVDKSRWQQGNVFSCSVMHEALHNHYTQKSLSLSPGK

SEQ ID NO: 327 - protein, 994 aa, Artificial Sequence
  AS170036 VL1VH1-56N98F108A-TCE-HLE
QSALTQPRSVSGSPGQSVTISCAGTSSDVGSENYVSWYQQHPGKAPKLMIYQVNKRASGVPDRFSGSKSGNTASLTISGLQAEDEADYYCASYRSSDFNIVFGGGTKLTVLGGGGSGGGGSGGGGSEVQLVESGGGLVQPGGSLRLSCAASGFTFSSYAMSWVRQAPGKGLEWVSTINSGTNSPYYADSVKGRFTISRDNSKNTLYLQMNSLRAEDTAVYYCAKNFFDGSWFLAPPAMDYWGQGTLVTVSSSGGGGSEVQLVESGGGLVQPGGSLKLSCAASGFTFNKYAMNWVRQAPGKGLEWVARIRSKYNNYATYYADSVKDRFTISRDDSKNTAYLQMNNLKTEDTAVYYCVRHGNFGNSYISYWAYWGQGTLVTVSSGGGGSGGGGSGGGGSQTVVTQEPSLTVSPGGTVTLTCGSSTGAVTSGNYPNWVQQKPGQAPRGLIGGTKFLAPGTPARFSGSLLGGKAALTLSGVQPEDEAEYYCVLWYSNRWVFGGGTKLTVLGGGGDKTHTCPPCPAPELLGGPSVFLFPPKPKDTLMISRTPEVTCVVVDVSHEDPEVKFNWYVDGVEVHNAKTKPCEEQYGSTYRCVSVLTVLHQDWLNGKEYKCKVSNKALPAPIEKTISKAKGQPREPQVYTLPPSREEMTKNQVSLTCLVKGFYPSDIAVEWESNGQPENNYKTTPPVLDSDGSFFLYSKLTVDKSRWQQGNVFSCSVMHEALHNHYTQKSLSLSPGKGGGGSGGGGSGGGGSGGGGSGGGGSGGGGSDKTHTCPPCPAPELLGGPSVFLFPPKPKDTLMISRTPEVTCVVVDVSHEDPEVKFNWYVDGVEVHNAKTKPCEEQYGSTYRCVSVLTVLHQDWLNGKEYKCKVSNKALPAPIEKTISKAKGQPREPQVYTLPPSREEMTKNQVSLTCLVKGFYPSDIAVEWESNGQPENNYKTTPPVLDSDGSFFLYSKLTVDKSRWQQGNVFSCSVMHEALHNHYTQKSLSLSPGK

SEQ ID NO: 328 - protein, 994 aa, Artificial Sequence
  AS170036 VL1VH1-57K98F108A-TCE-HLE
QSALTQPRSVSGSPGQSVTISCAGTSSDVGSENYVSWYQQHPGKAPKLMIYQVNKRASGVPDRFSGSKSGNTASLTISGLQAEDEADYYCASYRSSDFNIVFGGGTKLTVLGGGGSGGGGSGGGGSEVQLVESGGGLVQPGGSLRLSCAASGFTFSSYAMSWVRQAPGKGLEWVSTINSGTGKPYYADSVKGRFTISRDNSKNTLYLQMNSLRAEDTAVYYCAKNFFDGSWFLAPPAMDYWGQGTLVTVSSSGGGGSEVQLVESGGGLVQPGGSLKLSCAASGFTFNKYAMNWVRQAPGKGLEWVARIRSKYNNYATYYADSVKDRFTISRDDSKNTAYLQMNNLKTEDTAVYYCVRHGNFGNSYISYWAYWGQGTLVTVSSGGGGSGGGGSGGGGSQTVVTQEPSLTVSPGGTVTLTCGSSTGAVTSGNYPNWVQQKPGQAPRGLIGGTKFLAPGTPARFSGSLLGGKAALTLSGVQPEDEAEYYCVLWYSNRWVFGGGTKLTVLGGGGDKTHTCPPCPAPELLGGPSVFLFPPKPKDTLMISRTPEVTCVVVDVSHEDPEVKFNWYVDGVEVHNAKTKPCEEQYGSTYRCVSVLTVLHQDWLNGKEYKCKVSNKALPAPIEKTISKAKGQPREPQVYTLPPSREEMTKNQVSLTCLVKGFYPSDIAVEWESNGQPENNYKTTPPVLDSDGSFFLYSKLTVDKSRWQQGNVFSCSVMHEALHNHYTQKSLSLSPGKGGGGSGGGGSGGGGSGGGGSGGGGSGGGGSDKTHTCPPCPAPELLGGPSVFLFPPKPKDTLMISRTPEVTCVVVDVSHEDPEVKFNWYVDGVEVHNAKTKPCEEQYGSTYRCVSVLTVLHQDWLNGKEYKCKVSNKALPAPIEKTISKAKGQPREPQVYTLPPSREEMTKNQVSLTCLVKGFYPSDIAVEWESNGQPENNYKTTPPVLDSDGSFFLYSKLTVDKSRWQQGNVFSCSVMHEALHNHYTQKSLSLSPGK

SEQ ID NO: 329 - protein, 994 aa, Artificial Sequence
  AS170036 VL1VH1-57K98I108A-TCE-HLE
QSALTQPRSVSGSPGQSVTISCAGTSSDVGSENYVSWYQQHPGKAPKLMIYQVNKRASGVPDRFSGSKSGNTASLTISGLQAEDEADYYCASYRSSDINIVFGGGTKLTVLGGGGSGGGGSGGGGSEVQLVESGGGLVQPGGSLRLSCAASGFTFSSYAMSWVRQAPGKGLEWVSTINSGTGKPYYADSVKGRFTISRDNSKNTLYLQMNSLRAEDTAVYYCAKNFFDGSWFLAPPAMDYWGQGTLVTVSSSGGGGSEVQLVESGGGLVQPGGSLKLSCAASGFTFNKYAMNWVRQAPGKGLEWVARIRSKYNNYATYYADSVKDRFTISRDDSKNTAYLQMNNLKTEDTAVYYCVRHGNFGNSYISYWAYWGQGTLVTVSSGGGGSGGGGSGGGGSQTVVTQEPSLTVSPGGTVTLTCGSSTGAVTSGNYPNWVQQKPGQAPRGLIGGTKFLAPGTPARFSGSLLGGKAALTLSGVQPEDEAEYYCVLWYSNRWVFGGGTKLTVLGGGGDKTHTCPPCPAPELLGGPSVFLFPPKPKDTLMISRTPEVTCVVVDVSHEDPEVKFNWYVDGVEVHNAKTKPCEEQYGSTYRCVSVLTVLHQDWLNGKEYKCKVSNKALPAPIEKTISKAKGQPREPQVYTLPPSREEMTKNQVSLTCLVKGFYPSDIAVEWESNGQPENNYKTTPPVLDSDGSFFLYSKLTVDKSRWQQGNVFSCSVMHEALHNHYTQKSLSLSPGKGGGGSGGGGSGGGGSGGGGSGGGGSGGGGSDKTHTCPPCPAPELLGGPSVFLFPPKPKDTLMISRTPEVTCVVVDVSHEDPEVKFNWYVDGVEVHNAKTKPCEEQYGSTYRCVSVLTVLHQDWLNGKEYKCKVSNKALPAPIEKTISKAKGQPREPQVYTLPPSREEMTKNQVSLTCLVKGFYPSDIAVEWESNGQPENNYKTTPPVLDSDGSFFLYSKLTVDKSRWQQGNVFSCSVMHEALHNHYTQKSLSLSPGK

SEQ ID NO: 330 - protein, 994 aa, Artificial Sequence
  AS170036 VL1VH1-57K98Q108S-TCE-HLE
QSALTQPRSVSGSPGQSVTISCAGTSSDVGSENYVSWYQQHPGKAPKLMIYQVNKRASGVPDRFSGSKSGNTASLTISGLQAEDEADYYCASYRSSDQNIVFGGGTKLTVLGGGGSGGGGSGGGGSEVQLVESGGGLVQPGGSLRLSCAASGFTFSSYAMSWVRQAPGKGLEWVSTINSGTGKPYYADSVKGRFTISRDNSKNTLYLQMNSLRAEDTAVYYCAKNFFDGSWFLSPPAMDYWGQGTLVTVSSSGGGGSEVQLVESGGGLVQPGGSLKLSCAASGFTFNKYAMNWVRQAPGKGLEWVARIRSKYNNYATYYADSVKDRFTISRDDSKNTAYLQMNNLKTEDTAVYYCVRHGNFGNSYISYWAYWGQGTLVTVSSGGGGSGGGGSGGGGSQTVVTQEPSLTVSPGGTVTLTCGSSTGAVTSGNYPNWVQQKPGQAPRGLIGGTKFLAPGTPARFSGSLLGGKAALTLSGVQPEDEAEYYCVLWYSNRWVFGGGTKLTVLGGGGDKTHTCPPCPAPELLGGPSVFLFPPKPKDTLMISRTPEVTCVVVDVSHEDPEVKFNWYVDGVEVHNAKTKPCEEQYGSTYRCVSVLTVLHQDWLNGKEYKCKVSNKALPAPIEKTISKAKGQPREPQVYTLPPSREEMTKNQVSLTCLVKGFYPSDIAVEWESNGQPENNYKTTPPVLDSDGSFFLYSKLTVDKSRWQQGNVFSCSVMHEALHNHYTQKSLSLSPGKGGGGSGGGGSGGGGSGGGGSGGGGSGGGGSDKTHTCPPCPAPELLGGPSVFLFPPKPKDTLMISRTPEVTCVVVDVSHEDPEVKFNWYVDGVEVHNAKTKPCEEQYGSTYRCVSVLTVLHQDWLNGKEYKCKVSNKALPAPIEKTISKAKGQPREPQVYTLPPSREEMTKNQVSLTCLVKGFYPSDIAVEWESNGQPENNYKTTPPVLDSDGSFFLYSKLTVDKSRWQQGNVFSCSVMHEALHNHYTQKSLSLSPGK

SEQ ID NO: 331 - protein, 994 aa, Artificial Sequence
  AS170036 VL1VH1-57M98Q108A-TCE-HLE
QSALTQPRSVSGSPGQSVTISCAGTSSDVGSENYVSWYQQHPGKAPKLMIYQVNKRASGVPDRFSGSKSGNTASLTISGLQAEDEADYYCASYRSSDQNIVFGGGTKLTVLGGGGSGGGGSGGGGSEVQLVESGGGLVQPGGSLRLSCAASGFTFSSYAMSWVRQAPGKGLEWVSTINSGTGMPYYADSVKGRFTISRDNSKNTLYLQMNSLRAEDTAVYYCAKNFFDGSWFLAPPAMDYWGQGTLVTVSSSGGGGSEVQLVESGGGLVQPGGSLKLSCAASGFTFNKYAMNWVRQAPGKGLEWVARIRSKYNNYATYYADSVKDRFTISRDDSKNTAYLQMNNLKTEDTAVYYCVRHGNFGNSYISYWAYWGQGTLVTVSSGGGGSGGGGSGGGGSQTVVTQEPSLTVSPGGTVTLTCGSSTGAVTSGNYPNWVQQKPGQAPRGLIGGTKFLAPGTPARFSGSLLGGKAALTLSGVQPEDEAEYYCVLWYSNRWVFGGGTKLTVLGGGGDKTHTCPPCPAPELLGGPSVFLFPPKPKDTLMISRTPEVTCVVVDVSHEDPEVKFNWYVDGVEVHNAKTKPCEEQYGSTYRCVSVLTVLHQDWLNGKEYKCKVSNKALPAPIEKTISKAKGQPREPQVYTLPPSREEMTKNQVSLTCLVKGFYPSDIAVEWESNGQPENNYKTTPPVLDSDGSFFLYSKLTVDKSRWQQGNVFSCSVMHEALHNHYTQKSLSLSPGKGGGGSGGGGSGGGGSGGGGSGGGGSGGGGSDKTHTCPPCPAPELLGGPSVFLFPPKPKDTLMISRTPEVTCVVVDVSHEDPEVKFNWYVDGVEVHNAKTKPCEEQYGSTYRCVSVLTVLHQDWLNGKEYKCKVSNKALPAPIEKTISKAKGQPREPQVYTLPPSREEMTKNQVSLTCLVKGFYPSDIAVEWESNGQPENNYKTTPPVLDSDGSFFLYSKLTVDKSRWQQGNVFSCSVMHEALHNHYTQKSLSLSPGK

SEQ ID NO: 332 - protein, 453 aa, Artificial Sequence
  TCE-KIH Chain1
EVQLVESGGGLVQPGRSLRLSCAASGFTFDDYAMHWVRQAPGKGLEWVSGISWNSGSIGYADSVKGRFTISRDNAKNSLYLQMNSLRAEDTALYYCAKDSRGYGDYRLGGAYWGQGTLVTVSSASTKGPSVFPLAPSSKSTSGGTAALGCLVKDYFPEPVTVSWNSGALTSGVHTFPAVLQSSGLYSLSSVVTVPSSSLGTQTYICNVNHKPSDTKVDKKVEPKSCDKTHTCPPCPAPEAAGGPSVFLFPPKPKDTLMISRTPEVTCVVVDVSHEDPEVKFNWYVDGVEVHNAKTKPREEQYNSTYRVVSVLTVLHQDWLNGKEYKCKVSNKALPAPIEKTISKAKGQPREPQVYTLPPSREEMTKNQVSLWCLVKGFYPSDIAVEWESNGQPENNYKTTPPVLDSDGSFFLYSKLTVDKSRWQQGNVFSCSVMHEALHNHYTQKSLSLSPGK

SEQ ID NO: 333 - protein, 214 aa, Artificial Sequence
  TCE-KIH Chain3
EIVMTQSPATLSVSPGERATLSCRASQSVSSNLAWYQQKPGQAPRLLIYGASTRATGIPARFSGSGSGTEFTLTISSLQSEDFAVYYCQQYNNWPWTFGQGTKVEIKRTVAAPSVFIFPPSDEQLKSGTASVVCLLNNFYPREAKVQWKVDNALQSGNSQESVTEQDSKDSTYSLSSTLTLSKADYEKHKVYACEVTHQGLSSPVTKSFNRGEC

SEQ ID NO: 334 - protein, 505 aa, Artificial Sequence
  AS167821A-AS167821A -TCE-KIH Chain2
QVRLVESGGGSVQAGGSLRLSCAASGRTYSTYAMGWFRQAPGKEREGVATIYIGSGRTYYVDSVKGRFTISQDNAKNTLYLQMNNLKPEDTAMYYCTADVDPYESSWSRGLGYWGQGTQVTVSSGGGGSGGGGSGGGGSGGGGSGGGGSQVRLVESGGGSVQAGGSLRLSCAASGRTYSTYAMGWFRQAPGKEREGVATIYIGSGRTYYVDSVKGRFTISQDNAKNTLYLQMNNLKPEDTAMYYCTADVDPYESSWSRGLGYWGQGTQVTVSSEPKSSDKTHTCPPCPAPEAAGGPSVFLFPPKPKDTLMISRTPEVTCVVVDVSHEDPEVKFNWYVDGVEVHNAKTKPREEQYNSTYRVVSVLTVLHQDWLNGKEYKCKVSNKALPAPIEKTISKAKGQPREPQVYTLPPSREEMTKNQVSLSCAVKGFYPSDIAVEWESNGQPENNYKTTPPVLDSDGSFFLVSKLTVDKSRWQQGNVFSCSVMHEALHNRYTQKSLSLSPGK

SEQ ID NO: 335 - protein, 511 aa, Artificial Sequence
  AS167830A-AS167830A -TCE-KIH Chain2
QVKLVESGGGSVQAGGSLRLSCAASRSSEYMNRRFAMGWFRQASGKEREGVAVVYIGGGRTYYADSVKGRFTISQDNAKNTLYLQMNNLKPEDTAMYYCTADVDPYESSWSRDLGYWGQGTQVTVSSGGGGSGGGGSGGGGSGGGGSGGGGSQVKLVESGGGSVQAGGSLRLSCAASRSSEYMNRRFAMGWFRQASGKEREGVAVVYIGGGRTYYADSVKGRFTISQDNAKNTLYLQMNNLKPEDTAMYYCTADVDPYESSWSRDLGYWGQGTQVTVSSEPKSSDKTHTCPPCPAPEAAGGPSVFLFPPKPKDTLMISRTPEVTCVVVDVSHEDPEVKFNWYVDGVEVHNAKTKPREEQYNSTYRVVSVLTVLHQDWLNGKEYKCKVSNKALPAPIEKTISKAKGQPREPQVYTLPPSREEMTKNQVSLSCAVKGFYPSDIAVEWESNGQPENNYKTTPPVLDSDGSFFLVSKLTVDKSRWQQGNVFSCSVMHEALHNRYTQKSLSLSPGK

SEQ ID NO: 336 - protein, 16 aa, Artificial Sequence
  AS179723/AS179732 VH1g1 HCDR2
SNSGAGSTYYADSVKG

SEQ ID NO: 337 - protein, 16 aa, Artificial Sequence
  AS179723/AS179732 VH1g1-N73Y HCDR2
SNSGAGSTYYADSVKG

SEQ ID NO: 338 - protein, 13 aa, Artificial Sequence
  AS179723 VL1g1 LCDR1
SGSSNNIGGNYVN

SEQ ID NO: 339 - protein, 13 aa, Artificial Sequence
  AS179732 VL1g1 LCDR1
SGSSSNIGGNYVN

SEQ ID NO: 340 - protein, 17 aa, Artificial Sequence
  AS190259 VH1g1 HCDR2
AISGSGGSTYYADSVKG

SEQ ID NO: 341 - protein, 17 aa, Artificial Sequence
  AS170036 VH1 HCDR2 Consensus
  misc_feature (4)..(4): X1 is S, A, or T
  misc_feature (7)..(7): X2 is G, A, D, E, F, H, I, K, L, M, N, P, Q, R, S, T, V, W, or Y
  misc_feature (8)..(8): X3 is S, A, D, F, H, K, M, N, Q, R, T, W, or Y
  misc_feature (9)..(9): X4 is P, A, D, E, F, G, H, K, M, N, Q, R, S, T, V, W, or Y
TINXGTXXXYYADSVKG

SEQ ID NO: 342 - protein, 16 aa, Artificial Sequence
  AS170036 VH1 HCDR3 Consensus
  misc_feature (3)..(3): X5 is F, D, H, N, W, or Y
  misc_feature (4)..(4): X6 is D, A, E, G, I, L, M, N, P, Q, S, T, V, or W
  misc_feature (7)..(7): X7 is W, F, or M
  misc_feature (8)..(8): X8 is F, or W
  misc_feature (9)..(9): X9 is L, A, G, I, M, N, Q, S, T, or V
  misc_feature (10)..(10): X10 is G, A, D, E, F, H, I, L, M, N, Q, R, S, T, V, W, or Y
  misc_feature (11)..(11): X11 is P, A, N, or T
  misc_feature (12)..(12): X12 is P, A, D, E, G, I, L, N, Q, S, T, or V
NFXXGSXXXXXXAMDY

SEQ ID NO: 343 - protein, 14 aa, Artificial Sequence
  AS170036 VL1 LCDR1 Consensus
  misc_feature (10)..(10): X13 is E, A, D, G, H, I, L, M, N, P, Q, S, T, V, W, or Y
  misc_feature (12)..(12): X14 is Y, A, D, E, F, G, H, I, L, M, P, S, T, V, or W
AGTSSDVGSXNXVS

SEQ ID NO: 344 - protein, 11 aa, Artificial Sequence
  AS170036 VL1 LCDR3 Consensus
  misc_feature (3)..(3): X15 is Y, D, F, H, I, L, M, N, Q, T, V, or W
  misc_feature (7)..(7): X16 is D, A, E, F, G, H, I, K, L, M, N, P, Q, R, S, T, V, W, or Y
  misc_feature (8)..(8): X17 is H, A, D, F, G, I, K, L, M, N, P, Q, R, S, T, V, W, or Y
ASXRSSXXNIV

SEQ ID NO: 345 - protein, 11 aa, Artificial Sequence
  AS170036 VL1VH1-VLH98V VL CDR3
ASYRSSDVNIV

SEQ ID NO: 346 - protein, 11 aa, Artificial Sequence
  AS170036 VL1VH1-VLH98T VL CDR3
ASYRSSDTNIV

SEQ ID NO: 347 - protein, 11 aa, Artificial Sequence
  AS170036 VL1VH1-VLH98Q VL CDR3
ASYRSSDQNIV

SEQ ID NO: 348 - protein, 11 aa, Artificial Sequence
  AS170036 VL1VH1-VLH98P VL CDR3
ASYRSSDPNIV

SEQ ID NO: 349 - protein, 11 aa, Artificial Sequence
  AS170036 VL1VH1-VLH98I VL CDR3
ASYRSSDINIV

SEQ ID NO: 350 - protein, 11 aa, Artificial Sequence
  AS170036 VL1VH1-VLH98F VL CDR3
ASYRSSDFNIV

SEQ ID NO: 351 - protein, 11 aa, Artificial Sequence
  AS170036 VL1VH1-VLH98A VL CDR3
ASYRSSDANIV

SEQ ID NO: 352 - protein, 14 aa, Artificial Sequence
  AGTSSDVGSWNYVS
AGTSSDVGSWNYVS

SEQ ID NO: 353 - protein, 17 aa, Artificial Sequence
  AS170036 VL1VH1-VHG56Y VH CDR2
TINSGTYSPYYADSVKG

SEQ ID NO: 354 - protein, 17 aa, Artificial Sequence
  AS170036 VL1VH1-VHG56N VH CDR2
TINSGTNSPYYADSVKG

SEQ ID NO: 355 - protein, 17 aa, Artificial Sequence
  AS170036 VL1VH1-VHG56F VH CDR2
TINSGTFSPYYADSVKG

SEQ ID NO: 356 - protein, 17 aa, Artificial Sequence
  AS170036 VL1VH1-VHS57R VH CDR2
TINSGTGRPYYADSVKG

SEQ ID NO: 357 - protein, 17 aa, Artificial Sequence
  AS170036 VL1VH1-VHS57Q VH CDR2
TINSGTGQPYYADSVKG

SEQ ID NO: 358 - protein, 17 aa, Artificial Sequence
  AS170036 VL1VH1-VHS57M VH CDR2
TINSGTGMPYYADSVKG

SEQ ID NO: 359 - protein, 17 aa, Artificial Sequence
  AS170036 VL1VH1-VHS57K VH CDR2
TINSGTGKPYYADSVKG

SEQ ID NO: 360 - protein, 17 aa, Artificial Sequence
  AS170036 VL1VH1-VHS57H VH CDR2
TINSGTGHPYYADSVKG

SEQ ID NO: 361 - protein, 16 aa, Artificial Sequence
  AS170036 VL1VH1-VHG108S VH CDR3
NFFDGSWFLSPPAMDY

SEQ ID NO: 362 - protein, 16 aa, Artificial Sequence
  AS170036 VL1VH1-VHG108N VH CDR3
NFFDGSWFLNPPAMDY

SEQ ID NO: 363 - protein, 16 aa, Artificial Sequence
  AS170036 VL1VH1-VHG108M VH CDR3
NFFDGSWFLMPPAMDY

SEQ ID NO: 364 - protein, 16 aa, Artificial Sequence
  AS170036 VL1VH1-VHG108E VH CDR3
NFFDGSWFLEPPAMDY

SEQ ID NO: 365 - protein, 16 aa, Artificial Sequence
  AS170036 VL1VH1-VHG108D VH CDR3
NFFDGSWFLDPPAMDY

SEQ ID NO: 366 - protein, 16 aa, Artificial Sequence
  AS170036 VL1VH1-VHG108A VH CDR3
NFFDGSWFLAPPAMDY

SEQ ID NO: 367 - protein, 245 aa, Artificial Sequence
  AS176934
AVQLVESGGGLVQPGGSLRLSCAASGFTFSIYAMSWVRQAPGKGLEWVSSNSGAGSTYYSDSVKGRFTISRDYAKNTVYLQLNSLKTEDTGMYYCTKGTNVGSWSSLHYWGQGTQVTVSSGGGGSGGGGSGGGGSQPVLTQPPSMSGSPRQSVTISCTGSSSNIGNNYVNWYQHLPGTAPKLLIYDNSARASGVPERFSGSKSDNSASLAITGLQAEDEGDYYCESWDGSRRAVVFGGGTHLTVL

SEQ ID NO: 368 - protein, 120 aa, Artificial Sequence
  AS176934 VH
AVQLVESGGGLVQPGGSLRLSCAASGFTFSIYAMSWVRQAPGKGLEWVSSNSGAGSTYYSDSVKGRFTISRDYAKNTVYLQLNSLKTEDTGMYYCTKGTNVGSWSSLHYWGQGTQVTVSS

SEQ ID NO: 369 - protein, 110 aa, Artificial Sequence
  AS176934 VL
QPVLTQPPSMSGSPRQSVTISCTGSSSNIGNNYVNWYQHLPGTAPKLLIYDNSARASGVPERFSGSKSDNSASLAITGLQAEDEGDYYCESWDGSRRAVVFGGGTHLTVL

SEQ ID NO: 370 - protein, 10 aa, Artificial Sequence
  AS176934 VH CDR1
GFTFSIYAMS

SEQ ID NO: 371 - protein, 16 aa, Artificial Sequence
  AS176934 VH CDR2
SNSGAGSTYYSDSVKG

SEQ ID NO: 372 - protein, 12 aa, Artificial Sequence
  AS176934 VH CDR3
GTNVGSWSSLHY

SEQ ID NO: 373 - protein, 13 aa, Artificial Sequence
  AS176934 VL CDR1
TGSSSNIGNNYVN

SEQ ID NO: 374 - protein, 7 aa, Artificial Sequence
  AS176934 VL CDR2
DNSARAS

SEQ ID NO: 375 - protein, 11 aa, Artificial Sequence
  AS176934 VL CDR3
ESWDGSRRAVV

SEQ ID NO: 376 - protein, 240 aa, Artificial Sequence
  AS176951
AVQLVESGGGLVQPGGSLRISCEASGFTFLNYAMSWVRQAPGKGLEWVSSHSGAGSTYYSDSVKGRFTISRDYAKNTVYLQLNSLKTEDTGMYYCAKGTNVGSWSSLHYWGQGTQVTVSSGGGGSGGGGSGGGGSSSELTQPSAVSVSLGETARITCQGGNFESYYSSWYQQKPGQAPVLVIYKDSERPSGIAERFSGSSSGGTATLTISGAQAEDEASYYCQSADSSIVFGGGTHLTVL

SEQ ID NO: 377 - protein, 120 aa, Artificial Sequence
  AS176951 VH
AVQLVESGGGLVQPGGSLRISCEASGFTFLNYAMSWVRQAPGKGLEWVSSHSGAGSTYYSDSVKGRFTISRDYAKNTVYLQLNSLKTEDTGMYYCAKGTNVGSWSSLHYWGQGTQVTVSS

SEQ ID NO: 378 - protein, 105 aa, Artificial Sequence
  AS176951 VL
SSELTQPSAVSVSLGETARITCQGGNFESYYSSWYQQKPGQAPVLVIYKDSERPSGIAERFSGSSSGGTATLTISGAQAEDEASYYCQSADSSIVFGGGTHLTVL

SEQ ID NO: 379 - protein, 10 aa, Artificial Sequence
  AS176951 VH CDR1
GFTFLNYAMS

SEQ ID NO: 380 - protein, 16 aa, Artificial Sequence
  AS176951 VH CDR2
SHSGAGSTYYSDSVKG

SEQ ID NO: 381 - protein, 12 aa, Artificial Sequence
  AS176951 VH CDR3
GTNVGSWSSLHY

SEQ ID NO: 382 - protein, 11 aa, Artificial Sequence
  AS176951 VL CDR1
QGGNFESYYSS

SEQ ID NO: 383 - protein, 7 aa, Artificial Sequence
  AS176951 VL CDR2
KDSERPS

SEQ ID NO: 384 - protein, 8 aa, Artificial Sequence
  AS176951 VL CDR3
QSADSSIV

SEQ ID NO: 385 - protein, 245 aa, Artificial Sequence
  AS176992
QVQLVESGGGLVQPGGSLRLSCAASGFTFSRHYMSWVRQAPGKGLEWVSSIYSDGSNTYYAESVKGRFTISRDNAKNTVYLQMNSLKSEDTALYYCATDLRSWFSTVNALDAWGQGTLVTVSSGGGGSGGGGSGGGGSSSELTQPAAVSVSLGETARITCQGGNFGSYYASWHQQKPGQAPVLIIYGNSDRPFGIPERFSGSASGGTATLTISGAQAEDDADYYCQSYDSSANAVFGGGTHLTVL

SEQ ID NO: 386 - protein, 123 aa, Artificial Sequence
  AS176992 VH
QVQLVESGGGLVQPGGSLRLSCAASGFTFSRHYMSWVRQAPGKGLEWVSSIYSDGSNTYYAESVKGRFTISRDNAKNTVYLQMNSLKSEDTALYYCATDLRSWFSTVNALDAWGQGTLVTVSS

SEQ ID NO: 387 - protein, 107 aa, Artificial Sequence
  AS176992 VL
SSELTQPAAVSVSLGETARITCQGGNFGSYYASWHQQKPGQAPVLIIYGNSDRPFGIPERFSGSASGGTATLTISGAQAEDDADYYCQSYDSSANAVFGGGTHLTVL

SEQ ID NO: 388 - protein, 10 aa, Artificial Sequence
  AS176992 VH CDR1
GFTFSRHYMS

SEQ ID NO: 389 - protein, 17 aa, Artificial Sequence
  AS176992 VH CDR2
SIYSDGSNTYYAESVKG

SEQ ID NO: 390 - protein, 14 aa, Artificial Sequence
  AS176992 VH CDR3
DLRSWFSTVNALDA

SEQ ID NO: 391 - protein, 11 aa, Artificial Sequence
  AS176992 VL CDR1
QGGNFGSYYAS

SEQ ID NO: 392 - protein, 7 aa, Artificial Sequence
  AS176992 VL CDR2
GNSDRPF

SEQ ID NO: 393 - protein, 10 aa, Artificial Sequence
  AS176992 VL CDR3
QSYDSSANAV

SEQ ID NO: 394 - protein, 234 aa, Artificial Sequence
  AS177005
QVQLVQPGGSLRLSCAASGFTFSSYYMSWVRQAPGKGLEWVSSIYTGGGSTYYADSVKGRFTISKDNAKNTLYLQMNSLKPEDTAVYYCAAAIVVATGFGYWGQGTQVTVSSGGGGSGGGGSGGGGSSSELTQPSAVSVSLGQTARITCQGGNLGSSYVHWYQQKPGQAPVLVIYGDDSRPSGIPERFSGSSSGGIATLTISGAQAEDEADYYCQSYDSSNYAMFGGGTHLTVL

SEQ ID NO: 395 - protein, 112 aa, Artificial Sequence
  AS177005 VH
QVQLVQPGGSLRLSCAASGFTFSSYYMSWVRQAPGKGLEWVSSIYTGGGSTYYADSVKGRFTISKDNAKNTLYLQMNSLKPEDTAVYYCAAAIVVATGFGYWGQGTQVTVSS

SEQ ID NO: 396 - protein, 107 aa, Artificial Sequence
  AS177005 VL
SSELTQPSAVSVSLGQTARITCQGGNLGSSYVHWYQQKPGQAPVLVIYGDDSRPSGIPERFSGSSSGGIATLTISGAQAEDEADYYCQSYDSSNYAMFGGGTHLTVL

SEQ ID NO: 397 - protein, 10 aa, Artificial Sequence
  AS177005 VH CDR1
GFTFSSYYMS

SEQ ID NO: 398 - protein, 17 aa, Artificial Sequence
  AS177005 VH CDR2
SIYTGGGSTYYADSVKG

SEQ ID NO: 399 - protein, 10 aa, Artificial Sequence
  AS177005 VH CDR3
AIVVATGFGY

SEQ ID NO: 400 - protein, 11 aa, Artificial Sequence
  AS177005 VL CDR1
QGGNLGSSYVH

SEQ ID NO: 401 - protein, 7 aa, Artificial Sequence
  AS177005 VL CDR2
GDDSRPS

SEQ ID NO: 402 - protein, 10 aa, Artificial Sequence
  AS177005 VL CDR3
QSYDSSNYAM

SEQ ID NO: 403 - protein, 250 aa, Artificial Sequence
  AS170030
QLVESGGGLVQPGGSLRLSCTASGFTFSSYAMSWVRQAPGKGLEWVSTINSGTGSPYYADSVKGRFTISRDNAKNTLYLQLNSLKTEDTAMYYCAKNFFDGSWFLGPPAMDYWGKGTLVTVSSGGGGSGGGGSGGGGSQAGLTQPSSVSGTPGQTVTISCAGTSSDVGSGDYVSWYQQFPGTAPKLLIYQVNKRASGIPDRFSGSASGNMASMTISGLQSADEADYYCGSYRSGDNAVFGGGTHLTVLEV

SEQ ID NO: 404 - protein, 123 aa, Artificial Sequence
  AS170030 VH
QLVESGGGLVQPGGSLRLSCTASGFTFSSYAMSWVRQAPGKGLEWVSTINSGTGSPYYADSVKGRFTISRDNAKNTLYLQLNSLKTEDTAMYYCAKNFFDGSWFLGPPAMDYWGKGTLVTVSS

SEQ ID NO: 405 - protein, 112 aa, Artificial Sequence
  AS170030 VL
QAGLTQPSSVSGTPGQTVTISCAGTSSDVGSGDYVSWYQQFPGTAPKLLIYQVNKRASGIPDRFSGSASGNMASMTISGLQSADEADYYCGSYRSGDNAVFGGGTHLTVLEV

SEQ ID NO: 406 - protein, 10 aa, Artificial Sequence
  AS170030 VH CDR1
GFTFSSYAMS

SEQ ID NO: 407 - protein, 17 aa, Artificial Sequence
  AS170030 VH CDR2
TINSGTGSPYYADSVKG

SEQ ID NO: 408 - protein, 16 aa, Artificial Sequence
  AS170030 VH CDR3
NFFDGSWFLGPPAMDY

SEQ ID NO: 409 - protein, 14 aa, Artificial Sequence
  AS170030 VL CDR1
AGTSSDVGSGDYVS

SEQ ID NO: 410 - protein, 7 aa, Artificial Sequence
  AS170030 VL CDR2
QVNKRAS

SEQ ID NO: 411 - protein, 10 aa, Artificial Sequence
  AS170030 VL CDR3
GSYRSGDNAV

SEQ ID NO: 412 - protein, 21 aa, Artificial Sequence
  BBZ CAR signal peptide
MALPVTALLLPLALLLHAARP

SEQ ID NO: 413 - protein, 223 aa, Artificial Sequence
  BBZ CAR
TTTPAPRPPTPAPTIASQPLSLRPEACRPAAGGAVHTRGLDFACDIYIWAPLAGTCGVLLLSLVITLYCKRGRKKLLYIFKQPFMRPVQTTQEEDGCSCRFPEEEEGGCELRVKFSRSADAPAYKQGQNQLYNELNLGRREEYDVLDKRRGRDPEMGGKPRRKNPQEGLYNELQKDKMAEAYSEIGMKGERRRGKGHDGLYQGLSTATKDTYDALHMQALPPR

SEQ ID NO: 414 - protein, 22 aa, Artificial Sequence
  CD3e CAR signal peptide
MQSGTHWRVLGLCLLSVGVWGQ

SEQ ID NO: 415 - protein, 200 aa, Artificial Sequence
  CD3e CAR
GGGGSGGGGSGGGGSDGNEEMGGITQTPYKVSISGTTVILTCPQYPGSEILWQHNDKNIGGDEDDKNIGSDEDHLSLKEFSELEQSGYYVCYPRGSKPEDANFYLYLRARVCENCMEMDVMSVATIVIVDICITGGLLLLVYYWSKNRKAKAKPVTRGAGAGGRQRGQNKERPPPVPNPDYEPIRKGQRDLYSGLNQRRI

SEQ ID NO: 416 - protein, 495 aa, Artificial Sequence
  AS170036 CAR
MALPVTALLLPLALLLHAARPQLVESGGGLVQPGGSLRLSCTASGFTFSSYAMSWVRQAPGKGLEWVSTINSGTGSPYYADSVKGRFTISRDNAKNTLYLQLNSLKTEDTAMYYCAKNFFDGSWFLGPPAMDYWGKGTLVTISSGGGGSGGGGSGGGGSQLVLTQPSSVSGTPGQTVTISCAGTSSDVGSENYVSWYRQLPGTAPKLLIYQVNKRASGIADRFSGSKSGNTASMTISGLQSADEADYYCASYRSSDHNIVFGGGTHLTVLAVTTTPAPRPPTPAPTIASQPLSLRPEACRPAAGGAVHTRGLDFACDIYIWAPLAGTCGVLLLSLVITLYCKRGRKKLLYIFKQPFMRPVQTTQEEDGCSCRFPEEEEGGCELRVKFSRSADAPAYKQGQNQLYNELNLGRREEYDVLDKRRGRDPEMGGKPRRKNPQEGLYNELQKDKMAEAYSEIGMKGERRRGKGHDGLYQGLSTATKDTYDALHMQALPPR

SEQ ID NO: 417 - protein, 473 aa, Artificial Sequence
  AS170036-CD3e
MQSGTHWRVLGLCLLSVGVWGQQLVESGGGLVQPGGSLRLSCTASGFTFSSYAMSWVRQAPGKGLEWVSTINSGTGSPYYADSVKGRFTISRDNAKNTLYLQLNSLKTEDTAMYYCAKNFFDGSWFLGPPAMDYWGKGTLVTISSGGGGSGGGGSGGGGSQLVLTQPSSVSGTPGQTVTISCAGTSSDVGSENYVSWYRQLPGTAPKLLIYQVNKRASGIADRFSGSKSGNTASMTISGLQSADEADYYCASYRSSDHNIVFGGGTHLTVLAVGGGGSGGGGSGGGGSDGNEEMGGITQTPYKVSISGTTVILTCPQYPGSEILWQHNDKNIGGDEDDKNIGSDEDHLSLKEFSELEQSGYYVCYPRGSKPEDANFYLYLRARVCENCMEMDVMSVATIVIVDICITGGLLLLVYYWSKNRKAKAKPVTRGAGAGGRQRGQNKERPPPVPNPDYEPIRKGQRDLYSGLNQRRI

SEQ ID NO: 418 - protein, 499 aa, Artificial Sequence
  AS170036-28Z
MALPVTALLLPLALLLHAARPEVQLVESGGGLVQPGGSLRLSCTASGFTFSSYAMSWVRQAPGKGLEWVSTINSGTGSPYYADSVKGRFTISRDNAKNTLYLQLNSLKTEDTAMYYCAKNFFDGSWFLGPPAMDYWGKGTLVTISSGGGGSGGGGSGGGGSQLVLTQPSSVSGTPGQTVTISCAGTSSDVGSENYVSWYRQLPGTAPKLLIYQVNKRASGIADRFSGSKSGNTASMTISGLQSADEADYYCASYRSSDHNIVFGGGTHLTVLAVTTTPAPRPPTPAPTIASQPLSLRPEACRPAAGGAVHTRGLDFACDFWVLVVVGGVLACYSLLVTVAFIIFWVRSKRSRLLHSDYMNMTPRRPGPTRKHYQPYAPPRDFAAYRSRVKFSRSADAPAYKQGQNQLYNELNLGRREEYDVLDKRRGRDPEMGGKPRRKNPQEGLYNELQKDKMAEAYSEIGMKGERRRGKGHDGLYQGLSTATKDTYDALHMQALPPR

SEQ ID NO: 419 - protein, 541 aa, Artificial Sequence
  AS170036-28BBZ
MALPVTALLLPLALLLHAARPEVQLVESGGGLVQPGGSLRLSCTASGFTFSSYAMSWVRQAPGKGLEWVSTINSGTGSPYYADSVKGRFTISRDNAKNTLYLQLNSLKTEDTAMYYCAKNFFDGSWFLGPPAMDYWGKGTLVTISSGGGGSGGGGSGGGGSQLVLTQPSSVSGTPGQTVTISCAGTSSDVGSENYVSWYRQLPGTAPKLLIYQVNKRASGIADRFSGSKSGNTASMTISGLQSADEADYYCASYRSSDHNIVFGGGTHLTVLAVTTTPAPRPPTPAPTIASQPLSLRPEACRPAAGGAVHTRGLDFACDFWVLVVVGGVLACYSLLVTVAFIIFWVRSKRSRLLHSDYMNMTPRRPGPTRKHYQPYAPPRDFAAYRSKRGRKKLLYIFKQPFMRPVQTTQEEDGCSCRFPEEEEGGCELRVKFSRSADAPAYKQGQNQLYNELNLGRREEYDVLDKRRGRDPEMGGKPRRKNPQEGLYNELQKDKMAEAYSEIGMKGERRRGKGHDGLYQGLSTATKDTYDALHMQALPPR

SEQ ID NO: 420 - protein, 645 aa, Artificial Sequence
  AS170036-28Z-T2
MALPVTALLLPLALLLHAARPEVQLVESGGGLVQPGGSLRLSCTASGFTFSSYAMSWVRQAPGKGLEWVSTINSGTGSPYYADSVKGRFTISRDNAKNTLYLQLNSLKTEDTAMYYCAKNFFDGSWFLGPPAMDYWGKGTLVTISSGGGGSGGGGSGGGGSQLVLTQPSSVSGTPGQTVTISCAGTSSDVGSENYVSWYRQLPGTAPKLLIYQVNKRASGIADRFSGSKSGNTASMTISGLQSADEADYYCASYRSSDHNIVFGGGTHLTVLAVTTTPAPRPPTPAPTIASQPLSLRPEACRPAAGGAVHTRGLDFACDFWVLVVVGGVLACYSLLVTVAFIIFWVRSKRSRLLHSDYMNMTPRRPGPTRKHYQPYAPPRDFAAYRSRVKFSRSADAPAYKQGQNQLYNELNLGRREEYDVLDKRRGRDPEMGGKPRRKNPQEGLYNELQKDKMAEAYSEIGMKGERRRGKGHDGLYQGLSTATKDTYDALHMQALPPRICYDAFVSYSERDAYWVENLMVQELENFNPPFKLCLHKRDFIPGKWIIDNIIDSIEKSHKTVFVLSENFVKSEWCKYELDFSHFRLFDENNDAAILILLEPIEKKAIPQRFCKLRKIMNTKTYLEWPMDEAQREGFWVNLRAAIKS

SEQ ID NO: 421 - protein, 5 aa, Artificial Sequence
  Linker1
GGGGS

SEQ ID NO: 422 - protein, 15 aa, Artificial Sequence
  Linker2
GGGGSGGGGSGGGGS

SEQ ID NO: 423 - protein, 69 aa, Artificial Sequence
  CD8-Hinge-TM amino acid sequence
TTTPAPRPPTPAPTIASQPLSLRPEACRPAAGGAVHTRGLDFACDIYIWAPLAGTCGVLLLSLVITLYC

SEQ ID NO: 424 - protein, 45 aa, Artificial Sequence
  CD8 Hinge amino acid sequence
TTTPAPRPPTPAPTIASQPLSLRPEACRPAAGGAVHTRGLDFACD

SEQ ID NO: 425 - protein, 24 aa, Artificial Sequence
  CD8 TM amino acid sequence
IYIWAPLAGTCGVLLLSLVITLYC

SEQ ID NO: 426 - protein, 39 aa, Artificial Sequence
  CD28 hinge amino acid sequence
IEVMYPPPYLDNEKSNGTIIHVKGKHLCPSPLFPGPSKP

SEQ ID NO: 427 - protein, 27 aa, Artificial Sequence
  CD28 TM amino acid sequence
FWVLVVVGGVLACYSLLVTVAFIIFWV

SEQ ID NO: 428 - protein, 41 aa, Artificial Sequence
  CD28 co-stimulatory domain amino acid sequence
RSKRSRLLHSDYMNMTPRRPGPTRKHYQPYAPPRDFAAYRS

SEQ ID NO: 429 - protein, 83 aa, Artificial Sequence
  CD28-4-1BB co-stimulatory domain amino acid sequence
RSKRSRLLHSDYMNMTPRRPGPTRKHYQPYAPPRDFAAYRSKRGRKKLLYIFKQPFMRPVQTTQEEDGCSCRFPEEEEGGCEL

SEQ ID NO: 430 - protein, 42 aa, Artificial Sequence
  4-1BB intracellular signaling domain amino acid sequence
KRGRKKLLYIFKQPFMRPVQTTQEEDGCSCRFPEEEEGGCEL

SEQ ID NO: 431 - protein, 112 aa, Artificial Sequence
  CD3 zeta amino acid sequence
RVKFSRSADAPAYKQGQNQLYNELNLGRREEYDVLDKRRGRDPEMGGKPRRKNPQEGLYNELQKDKMAEAYSEIGMKGERRRGKGHDGLYQGLSTATKDTYDALHMQALPPR

SEQ ID NO: 432 - protein, 493 aa, Artificial Sequence
  ET1402L1 CAR
MALPVTALLLPLALLLHAARPEVQLVQSGAEVKKPGESLTISCKASGYSFPNYWITWVRQMSGGGLEWMGRIDPGDSYTTYNPSFQGHVTISIDKSTNTAYLHWNSLKASDTAMYYCARYYVSLVDIWGQGTLVTVSSSRGGGGSGGGGSGGGGSLEMAQSVLTQPASVSGSPGQSITISCTGTSSDVGGYNYVSWYQQHPGKAPKLMIYDVNNRPSEVSNRFSGSKSGNTASLTISGLQAEDEADYYCSSYTTGSRAVFGGGTKLTVLGTTTPAPRPPTPAPTIASQPLSLRPEACRPAAGGAVHTRGLDFACDIYIWAPLAGTCGVLLLSLVITLYCKRGRKKLLYIFKQPFMRPVQTTQEEDGCSCRFPEEEEGGCELRVKFSRSADAPAYKQGQNQLYNELNLGRREEYDVLDKRRGRDPEMGGKPRRKNPQEGLYNELQKDKMAEAYSEIGMKGERRRGKGHDGLYQGLSTATKDTYDALHMQALPPR

SEQ ID NO: 433 - protein, 242 aa, Artificial Sequence
  ET1402L1 scFv
QSVLTQPASVSGSPGQSITISCTGTSSDVGGYNYVSWYQQHPGKAPKLMIYDVNNRPSEVSNRFSGSKSGNTASLTISGLQAEDEADYYCSSYTTGSRAVFGGGTKLTVLGGGGSGGGGSGGGGSEVQLVQSGAEVKKPGESLTISCKASGYSFPNYWITWVRQMSGGGLEWMGRIDPGDSYTTYNPSFQGHVTISIDKSTNTAYLHWNSLKASDTAMYYCARYYVSLVDIWGQGTLVTVSS

SEQ ID NO: 434 - protein, 496 aa, Artificial Sequence
  ET1402L-TCE
QSVLTQPASVSGSPGQSITISCTGTSSDVGGYNYVSWYQQHPGKAPKLMIYDVNNRPSEVSNRFSGSKSGNTASLTISGLQAEDEADYYCSSYTTGSRAVFGGGTKLTVLGGGGSGGGGSGGGGSEVQLVQSGAEVKKPGESLTISCKASGYSFPNYWITWVRQMSGGGLEWMGRIDPGDSYTTYNPSFQGHVTISIDKSTNTAYLHWNSLKASDTAMYYCARYYVSLVDIWGQGTLVTVSSGGGGSDIKLQQSGAELARPGASVKMSCKTSGYTFTRYTMHWVKQRPGQGLEWIGYINPSRGYTNYNQKFKDKATLTTDKSSSTAYMQLSSLTSEDSAVYYCARYYDDHYCLDYWGQGTTLTVSSVEGGSGGSGGSGGSGGVDDIQLTQSPAIMSASPGEKVTMTCRASSSVSYMNWYQQKSGTSPKRWIYDTSKVASGVPYRFSGSGSGTSYSLTISSMEAEDAATYYCQQWSSNPLTFGAGTKLELKHHHHHH

SEQ ID NO: 435 - protein, 985 aa, Artificial Sequence
  ET1402L-TCE-HLE
QSVLTQPASVSGSPGQSITISCTGTSSDVGGYNYVSWYQQHPGKAPKLMIYDVNNRPSEVSNRFSGSKSGNTASLTISGLQAEDEADYYCSSYTTGSRAVFGGGTKLTVLGGGGSGGGGSGGGGSEVQLVQSGAEVKKPGESLTISCKASGYSFPNYWITWVRQMSGGGLEWMGRIDPGDSYTTYNPSFQGHVTISIDKSTNTAYLHWNSLKASDTAMYYCARYYVSLVDIWGQGTLVTVSSSGGGGSEVQLVESGGGLVQPGGSLKLSCAASGFTFNKYAMNWVRQAPGKGLEWVARIRSKYNNYATYYADSVKDRFTISRDDSKNTAYLQMNNLKTEDTAVYYCVRHGNFGNSYISYWAYWGQGTLVTVSSGGGGSGGGGSGGGGSQTVVTQEPSLTVSPGGTVTLTCGSSTGAVTSGNYPNWVQQKPGQAPRGLIGGTKFLAPGTPARFSGSLLGGKAALTLSGVQPEDEAEYYCVLWYSNRWVFGGGTKLTVLGGGGDKTHTCPPCPAPELLGGPSVFLFPPKPKDTLMISRTPEVTCVVVDVSHEDPEVKFNWYVDGVEVHNAKTKPCEEQYGSTYRCVSVLTVLHQDWLNGKEYKCKVSNKALPAPIEKTISKAKGQPREPQVYTLPPSREEMTKNQVSLTCLVKGFYPSDIAVEWESNGQPENNYKTTPPVLDSDGSFFLYSKLTVDKSRWQQGNVFSCSVMHEALHNHYTQKSLSLSPGKGGGGSGGGGSGGGGSGGGGSGGGGSGGGGSDKTHTCPPCPAPELLGGPSVFLFPPKPKDTLMISRTPEVTCVVVDVSHEDPEVKFNWYVDGVEVHNAKTKPCEEQYGSTYRCVSVLTVLHQDWLNGKEYKCKVSNKALPAPIEKTISKAKGQPREPQVYTLPPSREEMTKNQVSLTCLVKGFYPSDIAVEWESNGQPENNYKTTPPVLDSDGSFFLYSKLTVDKSRWQQGNVFSCSVMHEALHNHYTQKSLSLSPGK

What is claimed is:

1. An antibody or antigen-binding fragment thereof that binds to a complex comprising an AFP peptide and an MHC molecule, comprising:
a heavy chain variable region (VH) comprising VH complementarity determining regions (CDRs) 1, 2, and 3; and
a light chain variable region (VL) comprising VL CDRs 1, 2, and 3, wherein:
(i)
(a) the VH CDR1 comprises GFTFSSYAMS (SEQ ID NO:78);
(b) the VH CDR2 comprises TINX₁GTX₂X₃X₄YYADSVKG (SEQ ID NO: 341) or AINSGGGSTYYADSVKG (SEQ ID NO: 123); and
(c) the VH CDR3 comprises NFX₅X₆GSX₇X₈X₉X₁₀X₁₁X₁₂AMDY (SEQ ID NO: 342) or AASGYGGSWWGDATLDA (SEQ ID NO: 125);
(d) the VL CDR1 comprises AGTSSDVGSX₁₃NX₁₄VS (SEQ ID NO: 343) or QGGGYYVN (SEQ ID NO: 129);
(e) the VL CDR2 comprises QVNKRAS (SEQ ID NO: 88) or LNTNRPS (SEQ ID NO: 131); and
(f) the VL CDR3 comprises ASX₁₅RSSX₁₆X₁₇NIV (SEQ ID NO: 344) or LNTNRPS (SEQ ID NO: 131);
and wherein:
X₁ is S, A, or T;
X₂ is G, A, D, E, F, H, I, K, L, M, N, P, Q, R, S, T, V, W, or Y;
X₃ is S, A, D, F, H, K, M, N, Q, R, T, W, or Y;
X₄ is P, A, D, E, F, G, H, K, M, N, Q, R, S, T, V, W, or Y;
X₅ is F, D, H, N, W, or Y;
X₆ is D, A, E, G, I, L, M, N, P, Q, S, T, V, or W;
X₇ is W, F, or M;
X₈ is F, or W;
X₉ is L, A, G, I, M, N, Q, S, T, or V;
X₁₀ is G, A, D, E, F, H, I, L, M, N, Q, R, S, T, V, W, or Y;
X₁₁ is P, A, N, or T;
X₁₂ is P, A, D, E, G, I, L, N, Q, S, T, or V;
X₁₃ is E, A, D, G, H, I, L, M, N, P, Q, S, T, V, W, or Y;
X₁₄ is Y, A, D, E, F, G, H, I, L, M, P, S, T, V, or W;
X₁₅ is Y, D, F, H, I, L, M, N, Q, T, V, or W;
X₁₆ is D, A, E, F, G, H, I, K, L, M, N, P, Q, R, S, T, V, W, or Y; and
X₁₇ is H, A, D, F, G, I, K, L, M, N, P, Q, R, S, T, V, W, or Y; or
(ii)
(a) the VH CDR1 comprises GFTFLNYAMS (SEQ ID NO:95);
(b) the VH CDR2 comprises SNSGAGSTYYSDSVKG (SEQ ID NO:97) or SNSGAGSTYYADSVKG (SEQ ID NO:337); and
(c) the VH CDR3 comprises GTNVGSWSSLHY (SEQ ID NO: 99);
(d) the VL CDR1 comprises TGSSNNIGGNYVN (SEQ ID NO: 103), TGSSSNIGGNYVN (SEQ ID NO: 112), SGSSNNIGGNYVN (SEQ ID NO: 338), or SGSSSNIGGNYVN (SEQ ID NO: 339);
(e) the VL CDR2 comprises DNKNRPS (SEQ ID NO: 105) or DNSNRAS (SEQ ID NO: 114); and
(f) the VL CDR3 comprises ASWDDSLSAVV (SEQ ID NO: 107) or ASWDDSLSGAV (SEQ ID NO: 116).

2. The antibody or antigen-binding fragment thereof of claim 1, wherein:
X₁ is S;
X₂ is G, A, D, E, F, H, K, L, M, N, Q, R, S, T, W, or Y;
X₃ is S, A, D, F, H, K, M, N, Q, R, T, W, or Y;
X₄ is P, A, E, G, or Q;
X₅ is F, W, or Y;
X₆ is D or E;
X₇ is W;
X₈ is F;
X₉ is L, I, M, or N;
X₁₀ is G, A, D, E, L, M, N, Q, S, T, or V;
X₁₁ is P;
X₁₂ is P, A, D, E, G, Q, S, T, or V;
X₁₃ is E, D, G, S, W, or Y;
X₁₄ is Y, H, or W;
X₁₅ is Y, F, I, L, M, Q, V, or W;
X₁₆ is D, A, F, G, H, K, N, R, S, or T; and
X₁₇ is H, A, F, G, I, L, M, N, P, Q, R, S, T, V, W, or Y.

3. The antibody or antigen-binding fragment thereof of claim 1 or 2, wherein:
X₁ is S;
X₂ is G, Y, N, or F;
X₃ is S, R, Q, M, K, or H;
X₄ is P;
X₅ is F;
X₆ is D;
X₇ is W;
X₈ is F;
X₉ is L;
X₁₀ is G, S, N, M, E, D, or A;
X₁₁ is P;
X₁₂ is P;
X₁₃ is E, or W;
X₁₄ is Y,
X₁₅ is Y,
X₁₆ is D; and
X₁₇ is H, V, T, Q, P, I, F, or A.

4. The antibody or antigen-binding fragment thereof of any one of claims 1-3, wherein one or more of the following are true:
(1) X₂ is Y;
(2) X₃ is K or H;
(3) X₁₀ is D or A;
(4) X₂ is N and X₁₇ is I;
(5) X₃ is M and X₁₇ is Q;
(6) X₂ is N and X₁₀ is A;
(7) X₃ is K and X₁₀ is S;
(8) X₁₇ is I and X₁₀ is A;
(9) X₂ is Y, X₁₇ is I, and X₁₀ is S; or
(10) X₂ is Y, X₁₇ is Q and X₁₀ is S.

5. The antibody or antigen-binding fragment thereof of any one of claims 1-4, comprising a VH that is at least 80%, 85%, 90%, 91%, 92%, 93%, 94%, 95%, 96%, 97%, 98%, 99% or 100% identical to SEQ ID NO: 76, 93, 119, 136, 168, 169, 172, 173, 174, 179, 180, 368, 377, 386, 395, or 404; and a VL that is at least 80%, 85%, 90%, 91%, 92%, 93%, 94%, 95%, 96%, 97%, 98%, 99% or 100% identical to SEQ ID NO: 84, 101, 110, 127, 144, 170, 171, 175, 176, 177, 178, 181, 182, 369, 378, 387, 396, or 405.

6. The antibody or antigen-binding fragment thereof of any one of claims 1-4, comprising a VH that is at least 80%, 85%, 90%, 91%, 92%, 93%, 94%, 95%, 96%, 97%, 98%, 99% or 100% identical to amino acids 127-251 of SEQ ID NO: 191-296; and a VL that is at least 80%, 85%, 90%, 91%, 92%, 93%, 94%, 95%, 96%, 97%, 98%, 99% or 100% identical to amino acids 1-111 of SEQ ID NO: 191-296.

7. The antibody or antigen-binding fragment thereof of any one of claims 1-6, wherein the antibody or antigen-binding fragment thereof is a scFv.

8. The antibody or antigen-binding fragment thereof of claim 7, wherein the antibody or antigen-binding fragment thereof comprises a sequence that is at least 80%, 85%, 90%, 91%, 92%, 93%, 94%, 95%, 96%, 97%, 98%, 99% or 100% identical to a sequence selected from SEQ ID NO: 75, 92, 109, 118, 135, 183, 185, 187, 189, 367, 376, 385, 394, 403, and 191-296.

9. The antibody or antigen-binding fragment thereof of claim 8, wherein the antibody or antigen-binding fragment thereof comprises a sequence selected from SEQ ID NOs: 183, 185, 187, 189, 199, 205, 206, 211, 212, 217, 227, 231, 239, 246, 257, and 260.

10. An antibody or antigen-binding fragment thereof that binds to a complex comprising an AFP peptide and an MHC molecule, comprising:
a heavy chain variable region (VH) comprising complementarity determining regions (CDRs) 1, 2, and 3, wherein the VH CDR1 region comprises an amino acid sequence that is at least 80% identical to a selected VH CDR1 amino acid sequence, the VH CDR2 region comprises an amino acid sequence that is at least 80% identical to a selected VH CDR2 amino acid sequence, and the VH CDR3 region comprises an amino acid sequence that is at least 80% identical to a selected VH CDR3 amino acid sequence; and
a light chain variable region (VL) comprising CDRs 1, 2, and 3, wherein the VL CDR1 region comprises an amino acid sequence that is at least 80% identical to a selected VL CDR1 amino acid sequence, the VL CDR2 region comprises an amino acid sequence that is at least 80% identical to a selected VL CDR2 amino acid sequence, and the VL CDR3 region comprises an amino acid sequence that is at least 80% identical to a selected VL CDR3 amino acid sequence,
wherein the selected VH CDRs 1, 2, and 3 amino acid sequences and the selected VL CDRs, 1, 2, and 3 amino acid sequences are one of the following:
(1) the selected VH CDRs 1, 2, 3 amino acid sequences are set forth in SEQ ID NOs: 78, 80, and 82, respectively, and the selected VL CDRs 1, 2, 3 amino acid sequences are set forth in SEQ ID NOs: 86, 88, and 90 respectively;
(2) the selected VH CDRs 1, 2, 3 amino acid sequences are set forth in SEQ ID NOs: 95, 97, and 99, respectively, and the selected VL CDRs 1, 2, 3 amino acid sequences are set forth in SEQ ID NOs: 103, 105, and 107, respectively;
(3) the selected VH CDRs 1, 2, 3 amino acid sequences are set forth in SEQ ID NOs: 95, 97, and 99, respectively, and the selected VL CDRs 1, 2, 3 amino acid sequences are set forth in SEQ ID NOs: 112, 114, and 116, respectively;
(4) the selected VH CDRs 1, 2, 3 amino acid sequences are set forth in SEQ ID NOs: 121, 123, and 125, respectively, and the selected VL CDRs 1, 2, 3 amino acid sequences are set forth in SEQ ID NOs: 129, 131, and 133, respectively;
(5) the selected VH CDRs 1, 2, 3 amino acid sequences are set forth in SEQ ID NOs: 138, 140, and 142, respectively, and the selected VL CDRs 1, 2, 3 amino acid sequences are set forth in SEQ ID NOs: 146, 148, and 150, respectively;
(6) the selected VH CDRs 1, 2, 3 amino acid sequences are set forth in SEQ ID NOs: 95, 337, and 99, respectively, and the selected VL CDRs 1, 2, 3 amino acid sequences are set forth in SEQ ID NOs: 338, 105, and 107, respectively;
(7) the selected VH CDRs 1, 2, 3 amino acid sequences are set forth in SEQ ID NOs: 95, 337, and 99, respectively, and the selected VL CDRs 1, 2, 3 amino acid sequences are set forth in SEQ ID NOs: 339, 114, and 116, respectively;
(8) the selected VH CDRs 1, 2, 3 amino acid sequences are set forth in SEQ ID NOs: 121, 123, and 125, respectively, and the selected VL CDRs 1, 2, 3 amino acid sequences are set forth in SEQ ID NOs: 129, 131, and 133, respectively;
(9) the selected VH CDRs 1, 2, 3 amino acid sequences are set forth in SEQ ID NOs: 370, 371, and 372, respectively, and the selected VL CDRs 1, 2, 3 amino acid sequences are set forth in SEQ ID NOs: 373, 374, and 375, respectively;
(10) the selected VH CDRs 1, 2, 3 amino acid sequences are set forth in SEQ ID NOs: 379, 380, and 381, respectively, and the selected VL CDRs 1, 2, 3 amino acid sequences are set forth in SEQ ID NOs: 382, 383, and 384, respectively;
(11) the selected VH CDRs 1, 2, 3 amino acid sequences are set forth in SEQ ID NOs: 388, 389, and 390, respectively, and the selected VL CDRs 1, 2, 3 amino acid sequences are set forth in SEQ ID NOs: 391, 392, and 393, respectively;
(12) the selected VH CDRs 1, 2, 3 amino acid sequences are set forth in SEQ ID NOs: 397, 398, and 399, respectively, and the selected VL CDRs 1, 2, 3 amino acid sequences are set forth in SEQ ID NOs: 400, 401, and 402, respectively;
(13) the selected VH CDRs 1, 2, 3 amino acid sequences are set forth in SEQ ID NOs: 406, 407, and 408, respectively, and the selected VL CDRs 1, 2, 3 amino acid sequences are set forth in SEQ ID NOs: 409, 410, and 411, respectively;
(14) the selected VH CDRs 1, 2, 3 amino acid sequences are set forth in SEQ ID NOs: 95, 97, and 99, respectively, and the selected VL CDRs 1, 2, 3 amino acid sequences are set forth in SEQ ID NOs: 338, 105, and 107 respectively;
(15) the selected VH CDRs 1, 2, 3 amino acid sequences are set forth in SEQ ID NOs: 95, 97, and 99, respectively, and the selected VL CDRs 1, 2, 3 amino acid sequences are set forth in SEQ ID NOs: 339, 114, and 116 respectively;
(16) the selected VH CDRs 1, 2, 3 amino acid sequences are set forth in SEQ ID NOs: 95, 336, and 99, respectively, and the selected VL CDRs 1, 2, 3 amino acid sequences are set forth in SEQ ID NOs: 103, 105, and 107 respectively;
(17) the selected VH CDRs 1, 2, 3 amino acid sequences are set forth in SEQ ID NOs: 95, 336, and 99, respectively, and the selected VL CDRs 1, 2, 3 amino acid sequences are set forth in SEQ ID NOs: 112, 114, and 116 respectively;
(18) the selected VH CDRs 1, 2, 3 amino acid sequences are set forth in SEQ ID NOs: 95, 336, and 99, respectively, and the selected VL CDRs 1, 2, 3 amino acid sequences are set forth in SEQ ID NOs: 338, 105, and 107 respectively;
(19) the selected VH CDRs 1, 2, 3 amino acid sequences are set forth in SEQ ID NOs: 95, 336, and 99, respectively, and the selected VL CDRs 1, 2, 3 amino acid sequences are set forth in SEQ ID NOs: 339, 114, and 116 respectively; and
(20) the selected VH CDRs 1, 2, 3 amino acid sequences are set forth in SEQ ID NOs: 121, 340, and 125, respectively, and the selected VL CDRs 1, 2, 3 amino acid sequences are set forth in SEQ ID NOs: 129, 131, and 133, respectively.

11. An antibody or antigen-binding fragment thereof that binds to a complex comprising an AFP peptide and an MHC molecule, comprising:
a heavy chain variable region (VH) comprising complementarity determining regions (CDRs) 1, 2, and 3, wherein the VH CDR1 region comprises an amino acid sequence that is at least 80% identical to a selected VH CDR1 amino acid sequence, the VH CDR2 region comprises an amino acid sequence that is at least 80% identical to a selected VH CDR2 amino acid sequence, and the VH CDR3 region comprises an amino acid sequence that is at least 80% identical to a selected VH CDR3 amino acid sequence; and
a light chain variable region (VL) comprising CDRs 1, 2, and 3, wherein the VL CDR1 region comprises an amino acid sequence that is at least 80% identical to a selected VL CDR1 amino acid sequence, the VL CDR2 region comprises an amino acid sequence that is at least 80% identical to a selected VL CDR2 amino acid sequence, and the VL CDR3 region comprises an amino acid sequence that is at least 80% identical to a selected VL CDR3 amino acid sequence,
wherein the selected VH CDRs 1, 2, and 3 amino acid sequences and the selected VL CDRs, 1, 2, and 3 amino acid sequences are one of the following:
1) the selected VH CDRs 1, 2, 3 amino acid sequences are set forth in SEQ ID NOs: 78, 80, and 82, respectively, and the selected VL CDRs 1, 2, 3 amino acid sequences are set forth in SEQ ID NOs: 86, 88, and 345, respectively;
2) the selected VH CDRs 1, 2, 3 amino acid sequences are set forth in SEQ ID NOs: 78, 80, and 82, respectively, and the selected VL CDRs 1, 2, 3 amino acid sequences are set forth in SEQ ID NOs: 86, 88, and 346, respectively;
3) the selected VH CDRs 1, 2, 3 amino acid sequences are set forth in SEQ ID NOs: 78, 80, and 82, respectively, and the selected VL CDRs 1, 2, 3 amino acid sequences are set forth in SEQ ID NOs: 86, 88, and 347, respectively;
4) the selected VH CDRs 1, 2, 3 amino acid sequences are set forth in SEQ ID NOs: 78, 80, and 82, respectively, and the selected VL CDRs 1, 2, 3 amino acid sequences are set forth in SEQ ID NOs: 86, 88, and 348, respectively;
5) the selected VH CDRs 1, 2, 3 amino acid sequences are set forth in SEQ ID NOs: 78, 80, and 82, respectively, and the selected VL CDRs 1, 2, 3 amino acid sequences are set forth in SEQ ID NOs: 86, 88, and 349, respectively;
6) the selected VH CDRs 1, 2, 3 amino acid sequences are set forth in SEQ ID NOs: 78, 80, and 82, respectively, and the selected VL CDRs 1, 2, 3 amino acid sequences are set forth in SEQ ID NOs: 86, 88, and 350, respectively;
7) the selected VH CDRs 1, 2, 3 amino acid sequences are set forth in SEQ ID NOs: 78, 80, and 82, respectively, and the selected VL CDRs 1, 2, 3 amino acid sequences are set forth in SEQ ID NOs: 86, 88, and 351, respectively;
8) the selected VH CDRs 1, 2, 3 amino acid sequences are set forth in SEQ ID NOs: 78, 80, and 82, respectively, and the selected VL CDRs 1, 2, 3 amino acid sequences are set forth in SEQ ID NOs: 352, 88, and 90, respectively;
9) the selected VH CDRs 1, 2, 3 amino acid sequences are set forth in SEQ ID NOs: 78, 353, and 82, respectively, and the selected VL CDRs 1, 2, 3 amino acid sequences are set forth in SEQ ID NOs: 86, 88, and 90, respectively;
10) the selected VH CDRs 1, 2, 3 amino acid sequences are set forth in SEQ ID NOs: 78, 354, and 82, respectively, and the selected VL CDRs 1, 2, 3 amino acid sequences are set forth in SEQ ID NOs: 86, 88, and 90, respectively;
11) the selected VH CDRs 1, 2, 3 amino acid sequences are set forth in SEQ ID NOs: 78, 355, and 82, respectively, and the selected VL CDRs 1, 2, 3 amino acid sequences are set forth in SEQ ID NOs: 86, 88, and 90, respectively;
12) the selected VH CDRs 1, 2, 3 amino acid sequences are set forth in SEQ ID NOs: 78, 356, and 82, respectively, and the selected VL CDRs 1, 2, 3 amino acid sequences are set forth in SEQ ID NOs: 86, 88, and 90, respectively;
13) the selected VH CDRs 1, 2, 3 amino acid sequences are set forth in SEQ ID NOs: 78, 357, and 82, respectively, and the selected VL CDRs 1, 2, 3 amino acid sequences are set forth in SEQ ID NOs: 86, 88, and 90, respectively;
14) the selected VH CDRs 1, 2, 3 amino acid sequences are set forth in SEQ ID NOs: 78, 358, and 82, respectively, and the selected VL CDRs 1, 2, 3 amino acid sequences are set forth in SEQ ID NOs: 86, 88, and 90, respectively;
15) the selected VH CDRs 1, 2, 3 amino acid sequences are set forth in SEQ ID NOs: 78, 359, and 82, respectively, and the selected VL CDRs 1, 2, 3 amino acid sequences are set forth in SEQ ID NOs: 86, 88, and 90, respectively;
16) the selected VH CDRs 1, 2, 3 amino acid sequences are set forth in SEQ ID NOs: 78, 360, and 82, respectively, and the selected VL CDRs 1, 2, 3 amino acid sequences are set forth in SEQ ID NOs: 86, 88, and 90, respectively;
17) the selected VH CDRs 1, 2, 3 amino acid sequences are set forth in SEQ ID NOs: 78, 80, and 361, respectively, and the selected VL CDRs 1, 2, 3 amino acid sequences are set forth in SEQ ID NOs: 86, 88, and 90, respectively;
18) the selected VH CDRs 1, 2, 3 amino acid sequences are set forth in SEQ ID NOs: 78, 80, and 362, respectively, and the selected VL CDRs 1, 2, 3 amino acid sequences are set forth in SEQ ID NOs: 86, 88, and 90, respectively;
19) the selected VH CDRs 1, 2, 3 amino acid sequences are set forth in SEQ ID NOs: 78, 80, and 363, respectively, and the selected VL CDRs 1, 2, 3 amino acid sequences are set forth in SEQ ID NOs: 86, 88, and 90, respectively;
20) the selected VH CDRs 1, 2, 3 amino acid sequences are set forth in SEQ ID NOs: 78, 80, and 364, respectively, and the selected VL CDRs 1, 2, 3 amino acid sequences are set forth in SEQ ID NOs: 86, 88, and 90, respectively;
21) the selected VH CDRs 1, 2, 3 amino acid sequences are set forth in SEQ ID NOs: 78, 80, and 365, respectively, and the selected VL CDRs 1, 2, 3 amino acid sequences are set forth in SEQ ID NOs: 86, 88, and 90, respectively;
22) the selected VH CDRs 1, 2, 3 amino acid sequences are set forth in SEQ ID NOs: 78, 80, and 366, respectively, and the selected VL CDRs 1, 2, 3 amino acid sequences are set forth in SEQ ID NOs: 86, 88, and 90, respectively;
23) the selected VH CDRs 1, 2, 3 amino acid sequences are set forth in SEQ ID NOs: 78, 353, and 82, respectively, and the selected VL CDRs 1, 2, 3 amino acid sequences are set forth in SEQ ID NOs: 86, 88, and 350, respectively;
24) the selected VH CDRs 1, 2, 3 amino acid sequences are set forth in SEQ ID NOs: 78, 353, and 82, respectively, and the selected VL CDRs 1, 2, 3 amino acid sequences are set forth in SEQ ID NOs: 86, 88, and 349, respectively;
25) the selected VH CDRs 1, 2, 3 amino acid sequences are set forth in SEQ ID NOs: 78, 353, and 82, respectively, and the selected VL CDRs 1, 2, 3 amino acid sequences are set forth in SEQ ID NOs: 86, 88, and 347, respectively;
26) the selected VH CDRs 1, 2, 3 amino acid sequences are set forth in SEQ ID NOs: 78, 354, and 82, respectively, and the selected VL CDRs 1, 2, 3 amino acid sequences are set forth in SEQ ID NOs: 86, 88, and 350, respectively;
27) the selected VH CDRs 1, 2, 3 amino acid sequences are set forth in SEQ ID NOs: 78, 354, and 82, respectively, and the selected VL CDRs 1, 2, 3 amino acid sequences are set forth in SEQ ID NOs: 86, 88, and 349, respectively;
28) the selected VH CDRs 1, 2, 3 amino acid sequences are set forth in SEQ ID NOs: 78, 354, and 82, respectively, and the selected VL CDRs 1, 2, 3 amino acid sequences are set forth in SEQ ID NOs: 86, 88, and 347, respectively;
29) the selected VH CDRs 1, 2, 3 amino acid sequences are set forth in SEQ ID NOs: 78, 360, and 82, respectively, and the selected VL CDRs 1, 2, 3 amino acid sequences are set forth in SEQ ID NOs: 86, 88, and 350, respectively;
30) the selected VH CDRs 1, 2, 3 amino acid sequences are set forth in SEQ ID NOs: 78, 360, and 82, respectively, and the selected VL CDRs 1, 2, 3 amino acid sequences are set forth in SEQ ID NOs: 86, 88, and 349, respectively;
31) the selected VH CDRs 1, 2, 3 amino acid sequences are set forth in SEQ ID NOs: 78, 360, and 82, respectively, and the selected VL CDRs 1, 2, 3 amino acid sequences are set forth in SEQ ID NOs: 86, 88, and 347, respectively;
32) the selected VH CDRs 1, 2, 3 amino acid sequences are set forth in SEQ ID NOs: 78, 359, and 82, respectively, and the selected VL CDRs 1, 2, 3 amino acid sequences are set forth in SEQ ID NOs: 86, 88, and 350, respectively;
33) the selected VH CDRs 1, 2, 3 amino acid sequences are set forth in SEQ ID NOs: 78, 359, and 82, respectively, and the selected VL CDRs 1, 2, 3 amino acid sequences are set forth in SEQ ID NOs: 86, 88, and 349, respectively;
34) the selected VH CDRs 1, 2, 3 amino acid sequences are set forth in SEQ ID NOs: 78, 359, and 82, respectively, and the selected VL CDRs 1, 2, 3 amino acid sequences are set forth in SEQ ID NOs: 86, 88, and 347, respectively;
35) the selected VH CDRs 1, 2, 3 amino acid sequences are set forth in SEQ ID NOs: 78, 358, and 82, respectively, and the selected VL CDRs 1, 2, 3 amino acid sequences are set forth in SEQ ID NOs: 86, 88, and 350, respectively;
36) the selected VH CDRs 1, 2, 3 amino acid sequences are set forth in SEQ ID NOs: 78, 358, and 82, respectively, and the selected VL CDRs 1, 2, 3 amino acid sequences are set forth in SEQ ID NOs: 86, 88, and 349, respectively;
37) the selected VH CDRs 1, 2, 3 amino acid sequences are set forth in SEQ ID NOs: 78, 358, and 82, respectively, and the selected VL CDRs 1, 2, 3 amino acid sequences are set forth in SEQ ID NOs: 86, 88, and 347, respectively;
38) the selected VH CDRs 1, 2, 3 amino acid sequences are set forth in SEQ ID NOs: 78, 353, and 366, respectively, and the selected VL CDRs 1, 2, 3 amino acid sequences are set forth in SEQ ID NOs: 86, 88, and 90, respectively;
39) the selected VH CDRs 1, 2, 3 amino acid sequences are set forth in SEQ ID NOs: 78, 353, and 365, respectively, and the selected VL CDRs 1, 2, 3 amino acid sequences are set forth in SEQ ID NOs: 86, 88, and 90, respectively;
40) the selected VH CDRs 1, 2, 3 amino acid sequences are set forth in SEQ ID NOs: 78, 353, and 361, respectively, and the selected VL CDRs 1, 2, 3 amino acid sequences are set forth in SEQ ID NOs: 86, 88, and 90, respectively;
41) the selected VH CDRs 1, 2, 3 amino acid sequences are set forth in SEQ ID NOs: 78, 354, and 366, respectively, and the selected VL CDRs 1, 2, 3 amino acid sequences are set forth in SEQ ID NOs: 86, 88, and 90, respectively;
42) the selected VH CDRs 1, 2, 3 amino acid sequences are set forth in SEQ ID NOs: 78, 354, and 365, respectively, and the selected VL CDRs 1, 2, 3 amino acid sequences are set forth in SEQ ID NOs: 86, 88, and 90, respectively;
43) the selected VH CDRs 1, 2, 3 amino acid sequences are set forth in SEQ ID NOs: 78, 354, and 361, respectively, and the selected VL CDRs 1, 2, 3 amino acid sequences are set forth in SEQ ID NOs: 86, 88, and 90, respectively;
44) the selected VH CDRs 1, 2, 3 amino acid sequences are set forth in SEQ ID NOs: 78, 360, and 366, respectively, and the selected VL CDRs 1, 2, 3 amino acid sequences are set forth in SEQ ID NOs: 86, 88, and 90, respectively;
45) the selected VH CDRs 1, 2, 3 amino acid sequences are set forth in SEQ ID NOs: 78, 360, and 365, respectively, and the selected VL CDRs 1, 2, 3 amino acid sequences are set forth in SEQ ID NOs: 86, 88, and 90, respectively;
46) the selected VH CDRs 1, 2, 3 amino acid sequences are set forth in SEQ ID NOs: 78, 360, and 361, respectively, and the selected VL CDRs 1, 2, 3 amino acid sequences are set forth in SEQ ID NOs: 86, 88, and 90, respectively;
47) the selected VH CDRs 1, 2, 3 amino acid sequences are set forth in SEQ ID NOs: 78, 359, and 366, respectively, and the selected VL CDRs 1, 2, 3 amino acid sequences are set forth in SEQ ID NOs: 86, 88, and 90, respectively;
48) the selected VH CDRs 1, 2, 3 amino acid sequences are set forth in SEQ ID NOs: 78, 359, and 365, respectively, and the selected VL CDRs 1, 2, 3 amino acid sequences are set forth in SEQ ID NOs: 86, 88, and 90, respectively;
49) the selected VH CDRs 1, 2, 3 amino acid sequences are set forth in SEQ ID NOs: 78, 359, and 361, respectively, and the selected VL CDRs 1, 2, 3 amino acid sequences are set forth in SEQ ID NOs: 86, 88, and 90, respectively;
50) the selected VH CDRs 1, 2, 3 amino acid sequences are set forth in SEQ ID NOs: 78, 358, and 366, respectively, and the selected VL CDRs 1, 2, 3 amino acid sequences are set forth in SEQ ID NOs: 86, 88, and 90, respectively;
51) the selected VH CDRs 1, 2, 3 amino acid sequences are set forth in SEQ ID NOs: 78, 358, and 365, respectively, and the selected VL CDRs 1, 2, 3 amino acid sequences are set forth in SEQ ID NOs: 86, 88, and 90, respectively;
52) the selected VH CDRs 1, 2, 3 amino acid sequences are set forth in SEQ ID NOs: 78, 358, and 361, respectively, and the selected VL CDRs 1, 2, 3 amino acid sequences are set forth in SEQ ID NOs: 86, 88, and 90, respectively;
53) the selected VH CDRs 1, 2, 3 amino acid sequences are set forth in SEQ ID NOs: 78, 80, and 366, respectively, and the selected VL CDRs 1, 2, 3 amino acid sequences are set forth in SEQ ID NOs: 86, 88, and 350, respectively;
54) the selected VH CDRs 1, 2, 3 amino acid sequences are set forth in SEQ ID NOs: 78, 80, and 365, respectively, and the selected VL CDRs 1, 2, 3 amino acid sequences are set forth in SEQ ID NOs: 86, 88, and 350, respectively;
55) the selected VH CDRs 1, 2, 3 amino acid sequences are set forth in SEQ ID NOs: 78, 80, and 361, respectively, and the selected VL CDRs 1, 2, 3 amino acid sequences are set forth in SEQ ID NOs: 86, 88, and 350, respectively;
56) the selected VH CDRs 1, 2, 3 amino acid sequences are set forth in SEQ ID NOs: 78, 80, and 366, respectively, and the selected VL CDRs 1, 2, 3 amino acid sequences are set forth in SEQ ID NOs: 86, 88, and 349, respectively;
57) the selected VH CDRs 1, 2, 3 amino acid sequences are set forth in SEQ ID NOs: 78, 80, and 365, respectively, and the selected VL CDRs 1, 2, 3 amino acid sequences are set forth in SEQ ID NOs: 86, 88, and 349, respectively;
58) the selected VH CDRs 1, 2, 3 amino acid sequences are set forth in SEQ ID NOs: 78, 80, and 361, respectively, and the selected VL CDRs 1, 2, 3 amino acid sequences are set forth in SEQ ID NOs: 86, 88, and 349, respectively;
59) the selected VH CDRs 1, 2, 3 amino acid sequences are set forth in SEQ ID NOs: 78, 80, and 366, respectively, and the selected VL CDRs 1, 2, 3 amino acid sequences are set forth in SEQ ID NOs: 86, 88, and 347, respectively;
60) the selected VH CDRs 1, 2, 3 amino acid sequences are set forth in SEQ ID NOs: 78, 80, and 365, respectively, and the selected VL CDRs 1, 2, 3 amino acid sequences are set forth in SEQ ID NOs: 86, 88, and 347, respectively;
61) the selected VH CDRs 1, 2, 3 amino acid sequences are set forth in SEQ ID NOs: 78, 80, and 361, respectively, and the selected VL CDRs 1, 2, 3 amino acid sequences are set forth in SEQ ID NOs: 86, 88, and 347, respectively;
62) the selected VH CDRs 1, 2, 3 amino acid sequences are set forth in SEQ ID NOs: 78, 353, and 366, respectively, and the selected VL CDRs 1, 2, 3 amino acid sequences are set forth in SEQ ID NOs: 86, 88, and 350, respectively;
63) the selected VH CDRs 1, 2, 3 amino acid sequences are set forth in SEQ ID NOs: 78, 353, and 365, respectively, and the selected VL CDRs 1, 2, 3 amino acid sequences are set forth in SEQ ID NOs: 86, 88, and 350, respectively;
64) the selected VH CDRs 1, 2, 3 amino acid sequences are set forth in SEQ ID NOs: 78, 353, and 361, respectively, and the selected VL CDRs 1, 2, 3 amino acid sequences are set forth in SEQ ID NOs: 86, 88, and 350, respectively;
65) the selected VH CDRs 1, 2, 3 amino acid sequences are set forth in SEQ ID NOs: 78, 353, and 366, respectively, and the selected VL CDRs 1, 2, 3 amino acid sequences are set forth in SEQ ID NOs: 86, 88, and 349, respectively;
66) the selected VH CDRs 1, 2, 3 amino acid sequences are set forth in SEQ ID NOs: 78, 353, and 365, respectively, and the selected VL CDRs 1, 2, 3 amino acid sequences are set forth in SEQ ID NOs: 86, 88, and 349, respectively;
67) the selected VH CDRs 1, 2, 3 amino acid sequences are set forth in SEQ ID NOs: 78, 353, and 361, respectively, and the selected VL CDRs 1, 2, 3 amino acid sequences are set forth in SEQ ID NOs: 86, 88, and 349, respectively;
68) the selected VH CDRs 1, 2, 3 amino acid sequences are set forth in SEQ ID NOs: 78, 353, and 366, respectively, and the selected VL CDRs 1, 2, 3 amino acid sequences are set forth in SEQ ID NOs: 86, 88, and 347, respectively;
69) the selected VH CDRs 1, 2, 3 amino acid sequences are set forth in SEQ ID NOs: 78, 353, and 365, respectively, and the selected VL CDRs 1, 2, 3 amino acid sequences are set forth in SEQ ID NOs: 86, 88, and 347, respectively;
70) the selected VH CDRs 1, 2, 3 amino acid sequences are set forth in SEQ ID NOs: 78, 353, and 361, respectively, and the selected VL CDRs 1, 2, 3 amino acid sequences are set forth in SEQ ID NOs: 86, 88, and 347, respectively;
71) the selected VH CDRs 1, 2, 3 amino acid sequences are set forth in SEQ ID NOs: 78, 354, and 366, respectively, and the selected VL CDRs 1, 2, 3 amino acid sequences are set forth in SEQ ID NOs: 86, 88, and 350, respectively;
72) the selected VH CDRs 1, 2, 3 amino acid sequences are set forth in SEQ ID NOs: 78, 354, and 365, respectively, and the selected VL CDRs 1, 2, 3 amino acid sequences are set forth in SEQ ID NOs: 86, 88, and 350, respectively;
73) the selected VH CDRs 1, 2, 3 amino acid sequences are set forth in SEQ ID NOs: 78, 354, and 361, respectively, and the selected VL CDRs 1, 2, 3 amino acid sequences are set forth in SEQ ID NOs: 86, 88, and 350, respectively;
74) the selected VH CDRs 1, 2, 3 amino acid sequences are set forth in SEQ ID NOs: 78, 354, and 366, respectively, and the selected VL CDRs 1, 2, 3 amino acid sequences are set forth in SEQ ID NOs: 86, 88, and 349, respectively;
75) the selected VH CDRs 1, 2, 3 amino acid sequences are set forth in SEQ ID NOs: 78, 354, and 365, respectively, and the selected VL CDRs 1, 2, 3 amino acid sequences are set forth in SEQ ID NOs: 86, 88, and 349, respectively;
76) the selected VH CDRs 1, 2, 3 amino acid sequences are set forth in SEQ ID NOs: 78, 354, and 361, respectively, and the selected VL CDRs 1, 2, 3 amino acid sequences are set forth in SEQ ID NOs: 86, 88, and 349, respectively;
77) the selected VH CDRs 1, 2, 3 amino acid sequences are set forth in SEQ ID NOs: 78, 354, and 366, respectively, and the selected VL CDRs 1, 2, 3 amino acid sequences are set forth in SEQ ID NOs: 86, 88, and 347, respectively;
78) the selected VH CDRs 1, 2, 3 amino acid sequences are set forth in SEQ ID NOs: 78, 354, and 365, respectively, and the selected VL CDRs 1, 2, 3 amino acid sequences are set forth in SEQ ID NOs: 86, 88, and 347, respectively;
79) the selected VH CDRs 1, 2, 3 amino acid sequences are set forth in SEQ ID NOs: 78, 354, and 361, respectively, and the selected VL CDRs 1, 2, 3 amino acid sequences are set forth in SEQ ID NOs: 86, 88, and 347, respectively;
80) the selected VH CDRs 1, 2, 3 amino acid sequences are set forth in SEQ ID NOs: 78, 360, and 366, respectively, and the selected VL CDRs 1, 2, 3 amino acid sequences are set forth in SEQ ID NOs: 86, 88, and 350, respectively;
81) the selected VH CDRs 1, 2, 3 amino acid sequences are set forth in SEQ ID NOs: 78, 360, and 365, respectively, and the selected VL CDRs 1, 2, 3 amino acid sequences are set forth in SEQ ID NOs: 86, 88, and 350, respectively;
82) the selected VH CDRs 1, 2, 3 amino acid sequences are set forth in SEQ ID NOs: 78, 360, and 361, respectively, and the selected VL CDRs 1, 2, 3 amino acid sequences are set forth in SEQ ID NOs: 86, 88, and 350, respectively;
83) the selected VH CDRs 1, 2, 3 amino acid sequences are set forth in SEQ ID NOs: 78, 360, and 366, respectively, and the selected VL CDRs 1, 2, 3 amino acid sequences are set forth in SEQ ID NOs: 86, 88, and 349, respectively;
84) the selected VH CDRs 1, 2, 3 amino acid sequences are set forth in SEQ ID NOs: 78, 360, and 365, respectively, and the selected VL CDRs 1, 2, 3 amino acid sequences are set forth in SEQ ID NOs: 86, 88, and 349, respectively;
85) the selected VH CDRs 1, 2, 3 amino acid sequences are set forth in SEQ ID NOs: 78, 360, and 361, respectively, and the selected VL CDRs 1, 2, 3 amino acid sequences are set forth in SEQ ID NOs: 86, 88, and 349, respectively;
86) the selected VH CDRs 1, 2, 3 amino acid sequences are set forth in SEQ ID NOs: 78, 360, and 366, respectively, and the selected VL CDRs 1, 2, 3 amino acid sequences are set forth in SEQ ID NOs: 86, 88, and 347, respectively;
87) the selected VH CDRs 1, 2, 3 amino acid sequences are set forth in SEQ ID NOs: 78, 360, and 365, respectively, and the selected VL CDRs 1, 2, 3 amino acid sequences are set forth in SEQ ID NOs: 86, 88, and 347, respectively;
88) the selected VH CDRs 1, 2, 3 amino acid sequences are set forth in SEQ ID NOs: 78, 360, and 361, respectively, and the selected VL CDRs 1, 2, 3 amino acid sequences are set forth in SEQ ID NOs: 86, 88, and 347, respectively;
89) the selected VH CDRs 1, 2, 3 amino acid sequences are set forth in SEQ ID NOs: 78, 359, and 366, respectively, and the selected VL CDRs 1, 2, 3 amino acid sequences are set forth in SEQ ID NOs: 86, 88, and 350, respectively;
90) the selected VH CDRs 1, 2, 3 amino acid sequences are set forth in SEQ ID NOs: 78, 359, and 365, respectively, and the selected VL CDRs 1, 2, 3 amino acid sequences are set forth in SEQ ID NOs: 86, 88, and 350, respectively;
91) the selected VH CDRs 1, 2, 3 amino acid sequences are set forth in SEQ ID NOs: 78, 359, and 361, respectively, and the selected VL CDRs 1, 2, 3 amino acid sequences are set forth in SEQ ID NOs: 86, 88, and 350, respectively;
92) the selected VH CDRs 1, 2, 3 amino acid sequences are set forth in SEQ ID NOs: 78, 359, and 366, respectively, and the selected VL CDRs 1, 2, 3 amino acid sequences are set forth in SEQ ID NOs: 86, 88, and 349, respectively;
93) the selected VH CDRs 1, 2, 3 amino acid sequences are set forth in SEQ ID NOs: 78, 359, and 365, respectively, and the selected VL CDRs 1, 2, 3 amino acid sequences are set forth in SEQ ID NOs: 86, 88, and 349, respectively;
94) the selected VH CDRs 1, 2, 3 amino acid sequences are set forth in SEQ ID NOs: 78, 359, and 361, respectively, and the selected VL CDRs 1, 2, 3 amino acid sequences are set forth in SEQ ID NOs: 86, 88, and 349, respectively;
95) the selected VH CDRs 1, 2, 3 amino acid sequences are set forth in SEQ ID NOs: 78, 359, and 366, respectively, and the selected VL CDRs 1, 2, 3 amino acid sequences are set forth in SEQ ID NOs: 86, 88, and 347, respectively;
96) the selected VH CDRs 1, 2, 3 amino acid sequences are set forth in SEQ ID NOs: 78, 359, and 365, respectively, and the selected VL CDRs 1, 2, 3 amino acid sequences are set forth in SEQ ID NOs: 86, 88, and 347, respectively;
97) the selected VH CDRs 1, 2, 3 amino acid sequences are set forth in SEQ ID NOs: 78, 359, and 361, respectively, and the selected VL CDRs 1, 2, 3 amino acid sequences are set forth in SEQ ID NOs: 86, 88, and 347, respectively;
98) the selected VH CDRs 1, 2, 3 amino acid sequences are set forth in SEQ ID NOs: 78, 358, and 366, respectively, and the selected VL CDRs 1, 2, 3 amino acid sequences are set forth in SEQ ID NOs: 86, 88, and 350, respectively;
99) the selected VH CDRs 1, 2, 3 amino acid sequences are set forth in SEQ ID NOs: 78, 358, and 365, respectively, and the selected VL CDRs 1, 2, 3 amino acid sequences are set forth in SEQ ID NOs: 86, 88, and 350, respectively;
100) the selected VH CDRs 1, 2, 3 amino acid sequences are set forth in SEQ ID NOs: 78, 358, and 361, respectively, and the selected VL CDRs 1, 2, 3 amino acid sequences are set forth in SEQ ID NOs: 86, 88, and 350, respectively;
101) the selected VH CDRs 1, 2, 3 amino acid sequences are set forth in SEQ ID NOs: 78, 358, and 366, respectively, and the selected VL CDRs 1, 2, 3 amino acid sequences are set forth in SEQ ID NOs: 86, 88, and 349, respectively;
102) the selected VH CDRs 1, 2, 3 amino acid sequences are set forth in SEQ ID NOs: 78, 358, and 365, respectively, and the selected VL CDRs 1, 2, 3 amino acid sequences are set forth in SEQ ID NOs: 86, 88, and 349, respectively;
103) the selected VH CDRs 1, 2, 3 amino acid sequences are set forth in SEQ ID NOs: 78, 358, and 361, respectively, and the selected VL CDRs 1, 2, 3 amino acid sequences are set forth in SEQ ID NOs: 86, 88, and 349, respectively;
104) the selected VH CDRs 1, 2, 3 amino acid sequences are set forth in SEQ ID NOs: 78, 358, and 366, respectively, and the selected VL CDRs 1, 2, 3 amino acid sequences are set forth in SEQ ID NOs: 86, 88, and 347, respectively;
105) the selected VH CDRs 1, 2, 3 amino acid sequences are set forth in SEQ ID NOs: 78, 358, and 365, respectively, and the selected VL CDRs 1, 2, 3 amino acid sequences are set forth in SEQ ID NOs: 86, 88, and 347, respectively; or
106) the selected VH CDRs 1, 2, 3 amino acid sequences are set forth in SEQ ID NOs: 78, 358, and 361, respectively, and the selected VL CDRs 1, 2, 3 amino acid sequences are set forth in SEQ ID NOs: 86, 88, and 347, respectively.

12. The antibody or antigen-binding fragment thereof of claim 10 or 11, wherein the antibody or antigen-binding fragment is a single-chain variable fragment (scFv).

13. The antibody or antigen-binding fragment thereof of any one of claims 10-12, wherein the antibody or antigen-binding fragment specifically binds to a complex comprising a human AFP peptide and an MHC molecule.

14. The antibody or antigen-binding fragment thereof of claim 13, wherein the AFP peptide comprises a sequence that is at least 80%, 85%, 90%, 95%, or 100% identical to the amino acid sequence of SEQ ID NO: 3.

15. The antibody or antigen-binding fragment thereof of any one of claims 10-14, wherein the antibody or antigen-binding fragment is a humanized antibody or antigen-binding fragment thereof.

16. The antibody or antigen-binding fragment thereof of any one of claims 10-15, wherein the antibody or antigen-binding fragment is a chimeric antibody or antigen-binding fragment thereof or a human antibody or antigen-binding fragment thereof.

17. The antibody or antigen-binding fragment thereof of any one of claims 10-16, wherein the MHC molecule is HLA-A*02:01.

18. An antibody or antigen-binding fragment thereof that binds to a complex comprising an AFP peptide and an MHC molecule, comprising a heavy chain variable region (VH) comprising an amino acid sequence that is at least 80%, 85%, 90%, 95% or 100% identical to a selected VH sequence, and a light chain variable region (VL) comprising an amino acid sequence that is at least 80%, 85%, 90%, 95% or 100% identical to a selected VL sequence, wherein the selected VH sequence and the selected VL sequence are one of the following:
(1) the selected VH sequence is SEQ ID NO: 76, 168, or 169 and the selected VL sequence is SEQ ID NO: 84, 170, or 171;
(2) the selected VH sequence is SEQ ID NO: 93, 172, 173, or 174, and the selected VL sequence is SEQ ID NO: 101, 110, 175, 176, 177, or 178;
(3) the selected VH sequence is SEQ ID NO: 119, 179, or 180, and the selected VL sequence is SEQ ID NO: 127, 181, or 182;
(4) the selected VH sequence is SEQ ID NO: 136, and the selected VL sequence is SEQ ID NO: 144;
(5) the selected VH sequence is SEQ ID NO: 168, and the selected VL sequence is SEQ ID NO: 170;
(6) the selected VH sequence is SEQ ID NO: 174, and the selected VL sequence is SEQ ID NO: 176;
(7) the selected VH sequence is SEQ ID NO: 174, and the selected VL sequence is SEQ ID NO: 178;
(8) the selected VH sequence is SEQ ID NO: 179, and the selected VL sequence is SEQ ID NO: 181;
(9) the selected VH sequence is SEQ ID NO: 368, and the selected VL sequence is SEQ ID NO: 369;
(10) the selected VH sequence is SEQ ID NO: 377, and the selected VL sequence is SEQ ID NO: 378;
(11) the selected VH sequence is SEQ ID NO: 386, and the selected VL sequence is SEQ ID NO: 387;
(12) the selected VH sequence is SEQ ID NO: 395, and the selected VL sequence is SEQ ID NO: 396;
(13) the selected VH sequence is SEQ ID NO: 404, and the selected VL sequence is SEQ ID NO: 405; and
(14) the selected VH sequence is a sequence that is identical to amino acids 127-251 of SEQ ID NO: 191-296, and the selected VL sequence is a sequence that is identical to amino acids 1-111 of SEQ ID NO: 191-296.

19. The antibody or antigen-binding fragment thereof of claim 18, wherein the antibody or antigen-binding fragment specifically binds to a complex comprising a human AFP peptide and an MHC molecule.

20. The antibody or antigen-binding fragment thereof of claim 18 or 19, wherein the antibody or antigen-binding fragment is a humanized antibody or antigen-binding fragment thereof.

21. The antibody or antigen-binding fragment thereof of any one of claims 18-20, wherein the antibody or antigen-binding fragment is a single-chain variable fragment (scFv).

22. The antibody or antigen-binding fragment thereof of any one of claims 18-21, wherein the MHC molecule is HLA-A*02:01.

23. An antibody or antigen-binding fragment thereof that binds to a complex comprising an AFP peptide and an MHC molecule, comprising
a heavy chain variable region (VH) comprising VH CDR1, VH CDR2, and VH CDR3 that are identical to VH CDR1, VH CDR2, and VH CDR3 of a selected VH sequence, and
a light chain variable region (VL) comprising VL CDR1, VL CDR2, and VL CDR3 that are identical to VL CDR1, VL CDR2, and VL CDR3 of a selected VL sequence, wherein the selected VH sequence and the selected VL sequence are one of the following:
(1) the selected VH sequence is SEQ ID NO: 76, 168, or 169 and the selected VL sequence is SEQ ID NO: 84, 170, or 171;
(2) the selected VH sequence is SEQ ID NO: 93, 172, 173, or 174, and the selected VL sequence is SEQ ID NO: 101, 110, 175, 176, 177, or 178;
(3) the selected VH sequence is SEQ ID NO: 119, 179, or 180, and the selected VL sequence is SEQ ID NO: 127, 181, or 182; and
(4) the selected VH sequence is SEQ ID NO: 136, and the selected VL sequence is SEQ ID NO: 144;
(5) the selected VH sequence is SEQ ID NO: 168, and the selected VL sequence is SEQ ID NO: 170;
(6) the selected VH sequence is SEQ ID NO: 174, and the selected VL sequence is SEQ ID NO: 176;
(7) the selected VH sequence is SEQ ID NO: 174, and the selected VL sequence is SEQ ID NO: 178;
(8) the selected VH sequence is SEQ ID NO: 179, and the selected VL sequence is SEQ ID NO: 181;
(9) the selected VH sequence is SEQ ID NO: 368, and the selected VL sequence is SEQ ID NO: 369;
(10) the selected VH sequence is SEQ ID NO: 377, and the selected VL sequence is SEQ ID NO: 378;
(11) the selected VH sequence is SEQ ID NO: 386, and the selected VL sequence is SEQ ID NO: 387;
(12) the selected VH sequence is SEQ ID NO: 395, and the selected VL sequence is SEQ ID NO: 396;
(13) the selected VH sequence is SEQ ID NO: 404, and the selected VL sequence is SEQ ID NO: 405; and
(14) the selected VH sequence is a sequence that is identical to amino acids 127-251 of SEQ ID NO: 191-296, and the selected VL sequence is a sequence that is identical to amino acids 1-111 of SEQ ID NO: 191-296.

24. The antibody or antigen-binding fragment thereof of claim 23, wherein the antibody or antigen-binding fragment specifically binds to a complex comprising a human AFP peptide and an MHC molecule.

25. The antibody or antigen-binding fragment thereof of claim 23 or 24, wherein the antibody or antigen-binding fragment is a humanized antibody or antigen-binding fragment thereof.

26. The antibody or antigen-binding fragment thereof of any one of claims 23-25, wherein the antibody or antigen-binding fragment is a single-chain variable fragment (scFv).

27. The antibody or antigen-binding fragment thereof of any one of claims 23-26, wherein the MHC molecule is HLA-A*02:01.

28. An antibody or antigen-binding fragment thereof that binds to a complex comprising an AFP peptide and an MHC molecule, comprising:
a heavy chain single variable domain (V_{H}H) comprising complementarity determining regions (CDRs) 1, 2, and 3, wherein the V_{H}H CDR1 region comprises an amino acid sequence that is at least 80% identical to a selected V_{H}H CDR1 amino acid sequence, the V_{H}H CDR2 region comprises an amino acid sequence that is at least 80% identical to a selected V_{H}H CDR2 amino acid sequence, and the V_{H}H CDR3 region comprises an amino acid sequence that is at least 80% identical to a selected V_{H}H CDR3 amino acid sequence;
wherein the selected V_{H}H CDRs 1, 2, and 3 amino acid sequences are one of the following:
(1) the selected V_{H}H CDRs 1, 2, 3 amino acid sequences are set forth in SEQ ID NOs: 154, 156, 158, respectively;
(2) the selected V_{H}H CDRs 1, 2, 3 amino acid sequences are set forth in SEQ ID NOs: 162, 164, and 166, respectively.

29. An antibody or antigen-binding fragment thereof that binds to a complex comprising a human AFP peptide and an MHC molecule, comprising a heavy chain single variable region (V_{H}H) comprising an amino acid sequence that is at least 80% identical to a selected V_{H}H sequence, wherein the selected V_{H}H sequence is SEQ ID NO: 152 or SEQ ID NO: 160.

30. An antibody or antigen-binding fragment thereof that binds to a complex comprising an AFP peptide and an MHC molecule, comprising a heavy chain single variable region (V_{H}H) comprising V_{H}H CDR1, V_{H}H CDR2, and V_{H}H CDR3 that are identical to V_{H}H CDR1, V_{H}H CDR2, and V_{H}H CDR3 in a selected V_{H}H sequence, wherein the selected V_{H}H sequence is SEQ ID NO: 152 or SEQ ID NO: 160.

31. The antibody or antigen-binding fragment thereof of any one of claims 28-30, wherein the AFP peptide comprises SEQ ID NO: 3.

32. The antibody or antigen-binding fragment thereof of any one of claims 28-31, wherein the antibody or antigen-binding fragment is a humanized antibody or antigen-binding fragment thereof.

33. The antibody or antigen-binding fragment thereof of any one of claims 28-32, wherein the antibody or antigen-binding fragment comprises a human IgG Fc.

34. The antibody or antigen-binding fragment thereof of any one of claims 28-33, wherein the antibody or antigen-binding fragment comprises two or more V_{H}Hs.

35. The antibody or antigen-binding fragment thereof of any one of claims 28-34, wherein the MHC molecule is HLA-A*02:01.

36. An antibody or antigen-binding fragment thereof that cross-competes with the antibody or antigen-binding fragment thereof of any one of claims 1-35.

37. A protein construct that binds to a complex comprising an AFP peptide and an MHC molecule, comprising:
(1) a first functional moiety comprising an antigen-binding fragment thereof of any one of claims 1-36; and
(2) a second functional moiety comprising a T-cell engaging molecule.

38. The protein construct of claim 37, wherein the T-cell engaging molecule is a scFv targeting human CD3R.

39. The protein construct of claim 37 or 38, wherein the AFP peptide comprises a sequence that is at least 80% identical to the amino acid sequence of SEQ ID NO: 3.

40. The protein construct of any one of claims 37-39, wherein the MHC molecule is HLA-A*02:01.

41. The protein construct of any one of claims 37-40, wherein the first functional moiety and the second functional moiety are connected via a linker.

42. The protein construct of claim 41, wherein the linker comprises GGGGS (SEQ ID NO: 421).

43. The protein construct of claim 37, wherein the protein construct comprises an amino acid sequence of SEQ ID NO:297-300.

44. A protein construct, comprising:
(1) a first functional moiety comprising an antibody or antigen-binding fragment thereof of any one of claims 1-36; and
(2) a second functional moiety comprising a T-cell engaging molecule; and
(3) a third functional moiety comprising a single chain human crystallizable fragment.

45. The protein construct of claim 44, wherein the T-cell engaging molecule is a scFv targeting human CD3ε.

46. The protein construct of claim 44 or 45, wherein the first functional moiety, the second functional moiety, and the third functional moiety are connected via one or more linkers.

47. The protein construct of any one of claims 44-46, wherein the AFP peptide comprises a sequence that is at least 80% identical to the amino acid sequence of SEQ ID NO: 3.

48. The protein construct of any one of claims 44-47, wherein the MHC molecule is HLA-A*02:01.

49. The protein construct of any one of claims 44-48, wherein the protein construct comprises an amino acid sequence that is at least 80%, 85%, 90%, 95%, or 100% identical to a sequence selected from SEQ ID NO: 302-331.

50. A protein construct that binds to a complex comprising an AFP peptide and an MHC molecule, comprising:
(1) a first heavy chain polypeptide comprising a VH;
(2) a light chain polypeptide comparing a VL, where the VH and the VL associate with each other and specially bind to CD3,
(3) a second heavy chain polypeptide, comprising a heavy chain single variable region (V_{H}H) of SEQ ID NO: 152 or 160.

51. The protein construct of claim 50, wherein either one or both of the first heavy chain polypeptide and the second polypeptide comprise at least one mutation that reduces Fc mediated effector function.

52. The protein construct of claim 50 or 51, wherein either one or both of the first heavy chain polypeptide and the second polypeptide having Ala at either one or both of positions 234 and 235 (EU numbering).

53. The protein construct of any one of claims 50-52, wherein either one or both of the first heavy chain polypeptide and the second heavy chain polypeptide have Ser at position 366, Ala at position 368, and Val at position 407 (EU numbering).

54. The protein construct of any one of claims 50-53, wherein the second heavy chain polypeptide comprises two or more V_{H}Hs.

55. The protein construct of claim 50, wherein the first heavy chain polypeptide comprises an amino sequence that is at least 80% identical to SEQ ID NO: 332, the light chain polypeptide comprises an amino sequence that is at least 80% identical to SEQ ID NO: 333, and the second heavy chain polypeptide comprises an amino sequence that is at least 80% identical to SEQ ID NO:334 or SEQ ID NO: 335.

56. An antibody-drug conjugate comprising the antibody or antigen-binding fragment thereof of any one of claims 1-36 covalently bound to a therapeutic agent.

57. A pharmaceutical composition comprising the antibody or antigen-binding fragment thereof of any one of claims 1-36, the protein construct of any one of claims 37-55, or the antibody drug conjugate of claim 56, and a pharmaceutically acceptable carrier.

58. A nucleic acid comprising a polynucleotide encoding the antibody or antigen-binding fragment thereof of any one of claims 1-36 or the protein construct of any one of claims 37-55.

59. A vector comprising the nucleic acid of claim 58.

60. A cell comprising the vector of claim 59.

61. A method of producing an antibody or an antigen-binding fragment thereof of any one of claims 1-36 or a protein construct of any one of claims 37-55, the method comprising
(a) culturing the cell of claim 60 under conditions sufficient for the cell to produce the antibody or the antigen-binding fragment thereof or the protein construct; and
(b) collecting the antibody or the antigen-binding fragment thereof or the protein construct produced by the cell.

62. An engineered receptor comprising the antigen-binding fragment thereof of any one of claims 1-36.

63. The engineered receptor of claim 62, wherein the engineered receptor further comprises a transmembrane region, and an intracellular signaling domain.

64. The engineered receptor of claim 63, wherein the engineered receptor is a chimeric antigen receptor (“CAR”).

65. The engineered receptor of any one of claims 62-64, wherein the engineered receptor further comprises a hinge region.

66. The engineered receptor of any one of claims 62-65, wherein the transmembrane region comprises a transmembrane region of CD4, CD8, and/or CD28, or a portion thereof.

67. The engineered receptor of claim 65 or 66, wherein the hinge region comprises an amino acid sequence set forth in SEQ ID NO: 424 or 426, or an amino acid sequence that is at least 90% identical to SEQ ID NO: 424 or 426.

68. The engineered receptor of any of claims 62-67, wherein the intracellular signaling domain comprises a primary intracellular signaling sequence of an immune effector cell.

69. The engineered receptor of claim 68, wherein the intracellular signaling domain is or comprises a functional signaling domain of CD3 zeta.

70. The engineered receptor of claim 69, wherein the intracellular signaling domain is or comprises the amino acid sequence set forth in SEQ ID NO: 431 or an amino acid sequence that is at least 90% sequence identical to SEQ ID NO: 431.

71. The engineered receptor of any one of claims 62-70, wherein the intracellular signaling domain further comprises a costimulatory signaling domain.

72. The engineered receptor of claim 71, wherein the costimulatory signaling domain comprises a functional signaling domain from a protein selected from the group consisting of a MHC class I molecule, a TNF receptor protein, an Immunoglobulin-like protein, a cytokine receptor, an integrin, a signaling lymphocytic activation molecule (SLAM protein), an activating NK cell receptor, BTLA, a Toll ligand receptor, OX40, CD2, CD7, CD27, CD28, CD30, CD40, CDS, ICAM-1, LFA-1, CD11a/CD18, 4-1BB (CD137), B7-H3, CDS, ICAM-1, ICOS (CD278), GITR, BAFFR, LIGHT, HVEM (LIGHTR), KIRDS2, SLAMF7, NKp80 (KLRF1), NKp44, NKp30, NKp46, CD19, CD4, CD8alpha, CD8beta, IL2R beta, IL2R gamma, IL7R alpha, ITGA4, VLA1, CD49a, ITGA4, IA4, CD49D, ITGA6, VLA-6, CD49f, ITGAD, CD11d, ITGAE, CD103, ITGAL, CD11a, LFA-1, ITGAM, CD11b, ITGAX, CD11c, ITGB1, CD29, ITGB2, CD18, LFA-1, ITGB7, NKG2D, NKG2C, TNFR2, TRANCE/RANKL, DNAM1 (CD226), SLAMF4 (CD244, 2B4), CD84, CD96 (Tactile), CEACAM1, CRTAM, Ly9 (CD229), CD160 (BY55), PSGL1, CD100 (SEMA4D), CD69, SLAMF6 (NTB-A, Ly108), SLAM (SLAMF1, CD150, IPO-3), BLAME (SLAMF8), SELPLG (CD162), LTBR, LAT, GADS, SLP-76, PAG/Cbp, CD19a, and a CD83 ligand.

73. The engineered receptor of claim 71, wherein the costimulatory signaling domain comprises an intracellular signaling domain of 4-1BB and/or CD28.

74. The engineered receptor of claim 71, wherein the costimulatory signaling domain is or comprises an amino acid sequence set forth in SEQ ID NO: 428, 429, or 430 or an amino acid sequence that is at least 90% identical to SEQ ID NO: 428, 429, or 430.

75. The engineered receptor of any one of claims 62-74, wherein the engineered receptor comprises a signal peptide.

76. The engineered receptor of claim 75, wherein the signal peptide is at least 80%, 85%, 90%, 95% or 100% identical to SEQ ID NO: 412 or 414.

77. The engineered receptor of any one of claims 101-118, wherein the engineered receptor comprises a sequence that is at least 80%, 85%, 90%, 95% or 100% identical to 413 or 415.

78. The engineered receptor of claim 62, wherein the engineered receptor is a chimeric T cell receptor (“cTCR”).

79. The engineered receptor of claim 78, wherein the transmembrane domain is derived from the transmembrane domain of a TCR subunit selected from the group consisting of TCRα, TCRβ, TCRγ, TCRδ, CD3γ, CD3ε, and CD3δ.

80. The engineered receptor of claim 79, wherein the transmembrane domain is derived from the transmembrane domain of CD3ε.

81. The engineered receptor of any one of claims 78-80, wherein the intracellular signaling domain is derived from the intracellular signaling domain of a TCR subunit selected from the group consisting of TCRα, TCRβ, TCRγ, TCRδ, CD3γ, CD3ε, and CD3δ.

82. The engineered receptor of claim 81, wherein the intracellular signaling domain is derived from the intracellular signaling domain of CD3.

83. The engineered receptor of any one of claims 78-82, further comprising at least a portion of an extracellular domain of a TCR subunit.

84. The engineered receptor of claim 83, wherein the antigen binding fragment is fused to the N-terminus of CD3F (“eTCR”).

85. The engineered receptor of any one of claims 62-84, wherein the engineered receptor comprises a sequence that is at least 80%, 85%, 90%, 95% or 100% identical to SEQ ID NO: 416, 417, 418, 419, or 420.

86. A polynucleotide encoding the engineered receptor of any one of claims 62-85.

87. A vector comprising the polynucleotide of claim 86.

88. The vector of claim 87, wherein the vector is a viral vector.

89. An engineered cell expressing the engineered receptor of any one of claims 62-85.

90. The engineered cell of claim 89, wherein the engineered cell is an immune cell.

91. The engineered cell of claim 90, wherein the immune cell is an NK cell or a T cell.

92. The engineered cell of claim 91, wherein the engineered cell is a T cell.

93. The engineered cell of claim 92, wherein the T cell is selected from the group consisting of cytotoxic T cell, a helper T cell, a natural killer T (NK-T) cell, and a γδT cell.

94. A method for producing an engineered cell, comprising introducing a vector of claim 87 or 88 into a cell in vitro or ex vivo.

95. The method of claim 94, wherein the vector is a viral vector and the introducing is carried out by transduction.

96. A method of treating an AFP-associated disorder in a subject, comprising administering an effective amount of the antibody or antigen-binding fragment thereof of any one of claims 1-36, the protein construct of any one of claims 37-55, the antibody-drug conjugate of claim 56, the pharmaceutical composition of claim 57, or the engineered cell of any one of claims 124-130 to the subject.

97. The method of claim 96, wherein the AFP-associated disorder is a cancer.

98. The method of claim 97, wherein the cancer is liver cancer, ovarian cancer, testicular cancer, stomach cancer, colon cancer, lung cancer, breast cancer, or lymphoma.

99. The method of claim 97, wherein the cancer is hepatocellular carcinoma (HCC).
